(19) United States
(12) Patent Application Publication
(10) Pub. No.: US 2023/0332146 A1
(43) Pub. Date: Oct. 19, 2023

(54) DIFFERENTIAL KNOCKOUT OF A HETEROZYGOUS ALLELE OF SAMD9

(71) Applicants: Rafi Emmanuel, Ramla (IL); Joseph Dicken, Rehovot (IL); Michal Golan Mashiach, Ness Ziona (IL)

(72) Inventors: Rafi Emmanuel, Ramla (IL); Joseph Dicken, Rehovot (IL); Michal Golan Mashiach, Ness Ziona (IL)

(73) Assignee: EmendoBio Inc., Wilmington, DE (US)

(21) Appl. No.: 17/927,671

(22) PCT Filed: May 28, 2021
(86) PCT No.: PCT/US2021/034873

§ 371 Date: Nov. 23, 2022

Related U.S. Application Data
(60) Provisional application No. 63/031,175, filed on May 28, 2020.

(51) Int. Cl. C12N 15/113; C12N 15/90

(52) U.S. Cl. CPC C12N 15/113; C12N 15/907; C12N 2310/20; C12N 2320/34

(57) ABSTRACT

RNA molecules comprising a guide sequence portion having 17-50 contiguous nucleotides containing nucleotides in the sequence set forth in any one of SEQ ID NOs: 1-20640 and compositions, methods, and uses thereof.

[0001] Throughout this application, various publications are referenced, including referenced in parenthesis. The disclosures of all publications mentioned in this application in their entireties are hereby incorporated by reference into this application in order to provide additional description of the art to which this invention pertains and of the features in the art which can be employed with this invention.

### REFERENCE TO SEQUENCE LISTING

[0002] This application incorporates-by-reference nucleotide sequences which are present in the file named “210528_91330-A-PCT_Sequence_Listing_AWG.txt”, which is 4,392 kilobytes in size, and which was created on May 27, 2021 in the IBM-PC machine format, having an operating system compatibility with MS-Windows, which is contained in the text file filed May 28, 2021 as part of this application.

### BACKGROUND OF INVENTION

[0003] There are several classes of DNA variation in the human genome, including insertions and deletions, differences in the copy number of repeated sequences, and single nucleotide polymorphisms (SNPs). A SNP is a DNA sequence variation occurring when a single nucleotide (adenine (A), thymine (T), cytosine (C), or guanine (G)) in the genome differs between human subjects or paired chromosomes in an individual. Over the years, the different types of DNA variations have been the focus of the research community either as markers in studies to pinpoint traits or disease causation or as potential causes of genetic disorders.

[0004] A genetic disorder is caused by one or more abnormalities in the genome. Genetic disorders may be regarded as either “dominant” or “recessive.” Recessive genetic disorders are those which require two copies (i.e., two alleles) of the abnormal/defective gene to be present. In contrast, a dominant genetic disorder involves a gene or genes which exhibit(s) dominance over a normal (functional/healthy) gene or genes. As such, in dominant genetic disorders only a single copy (i.e., allele) of an abnormal gene is required to cause or contribute to the symptoms of a particular genetic disorder. Such mutations include, for example, gain-of-function mutations in which the altered gene product possesses a new molecular function or a new pattern of gene expression. Other examples include dominant negative mutations, which have a gene product that acts antagonistically to the wild-type allele.

### MIRAGE SYNDROME

[0005] Sterile alpha motif domain containing 9 (SAMD9) is a protein encoding gene that is involved in control of cell proliferation and functions as a tumor suppressor in some cancers (Davidsson et al., 2018). Several dominant negative mutations of the SAMD9 gene were shown to be associated with MIRAGE syndrome, which is a rare disorder that manifests as a form of syndromic adrenal hypoplasia, characterized by myelodysplasia, infection, restriction of growth, adrenal hypoplasia, genital phenotypes, and enteropathy (Narumi et al., 2016).

### SUMMARY OF THE INVENTION

[0006] Disclosed is an approach for knocking out the expression of a dominant-mutated allele by disrupting the dominant-mutated allele or degrading the resulting mRNA.

[0007] The present disclosure provides a method for utilizing at least one naturally occurring nucleotide difference or polymorphism (e.g., single nucleotide polymorphism (SNP)) for distinguishing/discriminating between two alleles of a gene, one allele bearing a mutation such that it encodes a mutated protein causing a disease phenotype (“mutated allele”) and a particular sequence in a SNP position (REF/SNP), and the other allele encoding for a functional protein (“functional allele”). In some embodiments, the SNP position is utilized for distinguishing/discriminating between two alleles of a gene bearing one or more disease associated mutations, such as to target one of the alleles bearing both the particular sequence in the SNP position (SNP/REF) and a disease associated mutation. In some embodiments, the disease-associated mutation is targeted. In some embodiments, the method further comprises the step of knocking out expression of the mutated protein and allowing expression of the functional protein.

[0008] The present disclosure also provides a method for modifying in a cell a mutant allele of the sterile alpha motif domain containing 9 (SAMD9) gene having a mutation associated with MIRAGE syndrome, the method comprising introducing to the cell a composition comprising:
[0009] a CRISPR nuclease or a sequence encoding the CRISPR nuclease; and
[0010] a first RNA molecule comprising a guide sequence portion having 17-50 nucleotides or a nucleotide sequence encoding the same,
wherein a complex of the CRISPR nuclease and the first RNA molecule affects a double strand break in the mutant allele of the SAMD9 gene.

[0011] According to embodiments of the present invention, there is provided a first RNA molecule comprising a guide sequence portion having 17-50 contiguous nucleotides containing nucleotides in the sequence set forth in any one of SEQ ID Nos: 1-20640.

[0012] According to some embodiments of the present invention, there is provided a composition comprising an RNA molecule comprising a guide sequence portion having 17-50 contiguous nucleotides containing nucleotides in the sequence set forth in any one of SEQ ID NOs: 1-20640 and a CRISPR nuclease.

[0013] According to some embodiments of the present invention, there is provided a method for inactivating a mutant SAMD9 allele in a cell, the method comprising delivering to the cell a composition comprising an RNA molecule comprising a guide sequence portion having 17-50 contiguous nucleotides containing nucleotides in the sequence set forth in any one of SEQ ID NOs: 1-20640 and a CRISPR nuclease. In some embodiments, the cell is a stem cell. In some embodiments, the stem cell is a hematopoietic stem/progenitor cell (HSC). In some embodiments, the delivering to the cell is performed in vitro, ex vivo, or in vivo. In some embodiments, the method is performed ex vivo and the cell is provided/explanted from an individual patient. In some embodiments, the method further comprises the step of introducing the resulting cell, with the modified/knocked out mutant SAMD9 allele, into the individual patient (e.g. autologous transplantation).

[0014] According to some embodiments of the present invention, there is provided a method for treating MIRAGE syndrome, the method comprising delivering to a cell of a subject having MIRAGE syndrome a composition comprising an RNA molecule comprising a guide sequence portion having 17-50 contiguous nucleotides containing nucleotides in the sequence set forth in any one of SEQ ID NOs: 1-20640 and a CRISPR nuclease.

[0015] According to some embodiments of the present invention, there is provided use of a composition comprising an RNA molecule comprising a guide sequence portion having 17-50 contiguous nucleotides containing nucleotides in the sequence set forth in any one of SEQ ID NOs: 1-20640 and a CRISPR nuclease for inactivating a mutant SAMD9 allele in a cell, comprising delivering to the cell the composition comprising an RNA molecule comprising a guide sequence portion having 17-50 contiguous nucleotides containing nucleotides in the sequence set forth in any one of SEQ ID NOs: 1-20640 and a CRISPR nuclease.

[0016] According to embodiments of the present invention, there is provided a medicament comprising an RNA molecule comprising a guide sequence portion having 17-50 contiguous nucleotides containing nucleotides in the sequence set forth in any one of SEQ ID NOs: 1-20640 and a CRISPR nuclease for use in inactivating a mutant SAMD9 allele in a cell, wherein the medicament is administered by delivering to the cell the composition comprising an RNA molecule comprising a guide sequence portion having 17-50 contiguous nucleotides containing nucleotides in the sequence set forth in any one of SEQ ID NOs: 1-20640 and a CRISPR nuclease.

[0017] According to some embodiments of the present invention, there is provided use of a composition comprising an RNA molecule comprising a guide sequence portion having 17-50 contiguous nucleotides containing nucleotides in the sequence set forth in any one of SEQ ID NOs: 1-20640 and a CRISPR nuclease for treating ameliorating or preventing MIRAGE syndrome, comprising delivering to a cell of a subject having or at risk of having MIRAGE syndrome the composition of comprising an RNA molecule comprising a guide sequence portion having 17-50 contiguous nucleotides containing nucleotides in the sequence set forth in any one of SEQ ID NOs: 1-20640 and a CRISPR nuclease. In some embodiments, the method is performed ex vivo and the cell is provided/explanted from the subject. In some embodiments, the method further comprises the step of introducing the resulting cell, with the modified/knocked out mutant SAMD9 allele, into the subject (e.g. autologous transplantation).

[0018] According to some embodiments of the present invention, there is provided a medicament comprising the composition comprising an RNA molecule comprising a guide sequence portion having 17-50 contiguous nucleotides containing nucleotides in the sequence set forth in any one of SEQ ID NOs: 1-20640 and a CRISPR nuclease for use in treating ameliorating or preventing MIRAGE syndrome, wherein the medicament is administered by delivering to a cell of a subject having or at risk of having MIRAGE syndrome the composition comprising an RNA molecule comprising a guide sequence portion having 17-50 contiguous nucleotides containing nucleotides in the sequence set forth in any one of SEQ ID NOs: 1-20640 and a CRISPR nuclease.

[0019] According to some embodiments of the present invention, there is provided a kit for inactivating a mutant SAMD9 allele in a cell, comprising an RNA molecule comprising a guide sequence portion having 17-50 contiguous nucleotides containing nucleotides in the sequence set forth in any one of SEQ ID NOs: 1-20640, a CRISPR nuclease, and/or a tracrRNA molecule; and instructions for delivering the RNA molecule; CRISPR nuclease, and/or the tracrRNA to the cell.

[0020] According to some embodiments of the present invention, there is provided a kit for treating MIRAGE syndrome in a subject, comprising an RNA molecule comprising a guide sequence portion having 17-50 contiguous nucleotides containing nucleotides in the sequence set forth in any one of SEQ ID NOs: 1-20640, a CRISPR nuclease, and/or a tracrRNA molecule; and instructions for delivering the RNA molecule; CRISPR nuclease, and/or the tracrRNA to a cell of a subject having or at risk of having MIRAGE syndrome.

### BRIEF DESCRIPTION OF THE DRAWINGS

[0021] FIG. 1: Guide activity of RNA guide molecules targeting SAMD9 in HeLa cells. An RNA guide molecule was co-transfected with SpCas9 to determine their on-target activity. Cells were harvested 72 hours post DNA transfection, genomic was DNA extracted, and the region of the mutation was amplified and analyzed by next-generation sequencing (NGS). The graph represents the % editing ± standard deviation (STDV) of three (3) independent transfections.

[0022] FIG. 2: Guide activity of novel OMNI CRISPR nucleases with RNA guide molecules targeting SAMD9 in HeLa cells. An RNA guide molecule was-co-transfected with each OMNI CRISPR nuclease to determine its on-target activity. Cells were harvested 72 hours post DNA transfection, genomic DNA was extracted, and the region of the mutation was amplified and analyzed by NGS. Transfection efficiency is measured by mCherry fluorescence. The graph represents the % editing ± STDV of three (3) independent transfections.

[0023] FIG. 3: Guide activity of RNA guide molecules targeting SAMD9 in donor-derived HSCs. RNPs complexed with SpCas9 and an RNA guide molecule were electroporated into HSCs to determine their activity. Cells were harvested 72 hours post RNP electroporation, genomic was DNA extracted, and the region of the mutation was amplified and analyzed by NGS. The graph represents the % editing ± STDV of two (2) independent electroporations. The table below the graph indicates the genotype of the HSCs for each SNP.

[0024] FIGS. 4A-4B: Effect of editing on protein levels of SAMD9 in U2OS cells. RNPs complexed with SpCas9 and a RNA guide molecule were electroporated into U2OSs. Cells were harvested six days post RNP electroporation, cells were lysed and analyzed by western blot (WB) assay (FIG. 4A). Relative protein levels to control (NT1 - control) were quantified for each sample (FIG. 4B).

[0025] FIGS. 5A-5D: Knockout strategies utilizing guides targeting SAMD9 - Schematic representation of example SAMD9 editing strategies. The SAMD9 protein-encoding exon is represented as a white box, the UTR regions are represented as dotted boxes, introns are represented as black lines, a nuclease is represented by scissors accompanied by an arrow that indicates the target site, a SNP is represented by a black star, a polyadenylation signal is represented by a black triangle, and a template encoding a splice acceptor is represented by a striped box. FIG. 5A: Strategy 1 - Creation of a frameshift generated by the use of a single discriminatory guide RNA molecule targeting a SNP within a mutated allele of a SAMD9 coding exon. FIG. 5B: Strategy 2 - Excision of the mutated SAMD9 coding exon using a first discriminatory guide RNA molecule and a second non-discriminatory guide RNA molecule. In the depicted schematic, the first discriminatory guide targets a SNP in Intron 2 and the second non-discriminatory guide RNA molecule targets the 3′UTR. In an alternative example of exon excision, the first discriminatory guide targets a SNP in the 3′UTR and the second non-discriminatory guide RNA molecule targets Intron 2. FIG. 5C: Strategy 3 - Excision of the polyadenylation signal of a mutated SAMD9 allele using a first discriminatory guide RNA molecule and a second non-discriminatory guide RNA molecule. FIG. 5D: Strategy 4 - Introduction of a splice acceptor site upstream of the coding exon of a mutated SAMD9 allele upon targeting a CRISPR nuclease to Intron 2 of the mutated allele using a discriminatory guide RNA molecule.

### DETAILED DESCRIPTION

[0026] Unless otherwise defined, all technical and/or scientific terms used herein have the same meaning as commonly understood by one of ordinary skill in the art to which the invention pertains. Although methods and materials similar or equivalent to those described herein can be used in the practice or testing of embodiments of the invention, exemplary methods and/or materials are described below. In case of conflict, the patent specification, including definitions, will control. In addition, the materials, methods, and examples are illustrative only and are not intended to be necessarily limiting.

[0027] It should be understood that the terms “a” and “an” as used above and elsewhere herein refer to “one or more” of the enumerated components. It will be clear to one of ordinary skill in the art that the use of the singular includes the plural unless specifically stated otherwise. Therefore, the terms “a,” “an” and “at least one” are used interchangeably in this application.

[0028] For purposes of better understanding the present teachings and in no way limiting the scope of the teachings, unless otherwise indicated, all numbers expressing quantities, percentages or proportions, and other numerical values used in the specification and claims, are to be understood as being modified in all instances by the term “about.” Accordingly, unless indicated to the contrary, the numerical parameters set forth in the following specification and attached claims are approximations that may vary depending upon the desired properties sought to be obtained. At the very least, each numerical parameter should at least be construed in light of the number of reported significant digits and by applying ordinary rounding techniques.

[0029] Unless otherwise stated, adjectives such as “substantially” and “about” modifying a condition or relationship characteristic of a feature or features of an embodiment of the invention, are understood to mean that the condition or characteristic is defined to within tolerances that are acceptable for operation of the embodiment for an application for which it is intended. Unless otherwise indicated, the word “or” in the specification and claims is considered to be the inclusive “or” rather than the exclusive or, and indicates at least one of, or any combination of items it conjoins.

[0030] In the description and claims of the present application, each of the verbs, “comprise,” “include” and “have” and conjugates thereof, are used to indicate that the object or objects of the verb are not necessarily a complete listing of components, elements or parts of the subject or subjects of the verb. Other terms as used herein are meant to be defined by their well-known meanings in the art.

[0031] The terms “nucleic acid template” and “donor”, refer to a nucleotide sequence that is inserted or copied into a genome. The nucleic acid template comprises a nucleotide sequence, e.g., of one or more nucleotides, that will be added to or will template a change in the target nucleic acid or may be used to modify the target sequence. A nucleic acid template sequence may be of any length, for example between 2 and 10,000 nucleotides in length, preferably between about 100 and 1,000 nucleotides in length, more preferably between about 200 and 500 nucleotides in length. A nucleic acid template may be a single stranded nucleic acid, a double stranded nucleic acid. In some embodiments, the nucleic acid template comprises a nucleotide sequence, e.g., of one or more nucleotides, that corresponds to wild type sequence of the target nucleic acid, e.g., of the target position. In some embodiments, the nucleic acid template comprises a nucleotide sequence, e.g., of one or more ribonucleotides, that corresponds to wild type sequence of the target nucleic acid, e.g., of the target position. In some embodiments, the nucleic acid template comprises modified nucleotides.

[0032] In some embodiments of the present invention, a DNA nuclease is utilized to affect a DNA break at a target site to induce cellular repair mechanisms, for example, but not limited to, non-homologous end-joining (NHEJ). During classical NHEJ, two ends of a double-strand break (DSB) site are ligated together in a fast but also inaccurate manner (i.e. frequently resulting in mutation of the DNA at the cleavage site in the form of small insertion or deletions) whereas during HDR, an intact homologous DNA donor is used to replace the DNA surrounding the cleavage site in an accurate manner. HDR can also mediate the precise insertion of exogenous DNA at the break site. Accordingly, the term “homology-directed repair” or “HDR” refers to a mechanism for repairing DNA damage in cells, for example, during repair of double-stranded and single-stranded breaks in DNA. HDR requires nucleotide sequence homology and uses a “nucleic acid template” (nucleic acid template or donor template used interchangeably herein) to repair the sequence where the double-stranded or single break occurred (e.g., DNA target sequence). This results in the transfer of genetic information from, for example, the nucleic acid template to the DNA target sequence. HDR may result in alteration of the DNA target sequence (e.g., insertion, deletion, mutation) if the nucleic acid template sequence differs from the DNA target sequence and part or all of the nucleic acid template polynucleotide or oligonucleotide is incorporated into the DNA target sequence. In some embodiments, an entire nucleic acid template polynucleotide, a portion of the nucleic acid template polynucleotide, or a copy of the nucleic acid template is integrated at the site of the DNA target sequence.

[0033] Insertion of an exogenous sequence (also called a “donor sequence,” donor template,” “donor molecule” or “donor”), for example, for insertion of a splice site to knockout expression of a gene, can also be carried out. For example, donor sequence can contain a non-homologous sequence flanked by two regions of homology to allow for efficient HDR at the location of interest. Additionally, donor sequences can comprise a vector molecule containing sequences that are not homologous to the region of interest in cellular chromatin. A donor molecule can contain several, discontinuous regions of homology to cellular chromatin. For example, for targeted insertion of sequences not normally present in a region of interest, said sequences can be present in a donor nucleic acid molecule and flanked by regions of homology to sequence in the region of interest. A donor molecule may be any length, for example ranging from several bases e.g. 10-20 bases to multiple kilobases in length.

[0034] The donor polynucleotide can be DNA or RNA, single-stranded and/or double-stranded and can be introduced into a cell in linear or circular form. See, e.g., U.S. Pat. Publication Nos. 2010/0047805; 2011/0281361; 2011/0207221; and 2019/0330620. If introduced in linear form, the ends of the donor sequence can be protected (e.g., from exonucleolytic degradation) by methods known to those of skill in the art. For example, one or more dideoxynucleotide residues are added to the 3′ terminus of a linear molecule and/or self-complementary oligonucleotides are ligated to one or both ends. See, for example, Chang et al. (1987) and Nehls et al. (1996). Additional methods for protecting exogenous polynucleotides from degradation include, but are not limited to, addition of terminal amino group(s) and the use of modified internucleotide linkages such as, for example, phosphorothioates, phosphoramidates, and O-methyl ribose or deoxyribose residues.

[0035] Accordingly, embodiments of the present invention may use a donor template for HDR that is DNA or RNA, single-stranded and/or double-stranded and can be introduced into a cell in linear or circular form.

[0036] A donor sequence may be an oligonucleotide and be used for targeted alteration of an endogenous sequence. The oligonucleotide may be introduced to the cell on a vector, may be electroporated into the cell, or may be introduced via other methods known in the art. The oligonucleotide can be used to insert a sequence with a desired purpose into an endogenous locus (e.g. a splice acceptor sequence to prevent expression of a coding exon).

[0037] A polynucleotide can be introduced into a cell as part of a vector molecule having additional sequences such as, for example, replication origins, promoters and genes encoding antibiotic resistance. Moreover, donor polynucleotides can be introduced as naked nucleic acid, as nucleic acid complexed with an agent such as a liposome or poloxamer, or can be delivered by viruses (e.g., adenovirus, AAV, herpesvirus, retrovirus, lentivirus and integrase defective lentivirus (IDLV)).

[0038] The donor molecule may be inserted into an endogenous gene such that all, some or none of the endogenous gene is expressed.

[0039] Furthermore, although not required for expression, an exogenous sequence of a template may also include transcriptional or translational regulatory sequences, for example, splice donor or splice acceptor sites.

[0040] As used herein, the term “modified cells” refers to cells in which a double strand break is affected by a complex of an RNA molecule and the CRISPR nuclease as a result of hybridization with the target sequence, i.e. on-target hybridization. The term “modified cells” may further encompass cells in which a repair or correction of a mutation was affected following the double strand break.

[0041] This invention provides a modified cell or cells obtained by use of any of the methods described herein. In an embodiment these modified cell or cells are capable of giving rise to progeny cells. In an embodiment these modified cell or cells are capable of giving rise to progeny cells after engraftment. As a non-limiting example, the modified cells may be hematopoietic stem cell (HSC), or any cell suitable for an allogenic cell transplant or autologous cell transplant.

[0042] This invention also provides a composition comprising these modified cells and a pharmaceutically acceptable carrier. Also provided is an in vitro or ex vivo method of preparing this, comprising mixing the cells with the pharmaceutically acceptable carrier.

[0043] As used herein, the term “targeting sequence” or “targeting molecule” refers a nucleotide sequence or molecule comprising a nucleotide sequence that is capable of hybridizing to a specific target sequence, e.g., the targeting sequence has a nucleotide sequence which is at least partially complementary to the sequence being targeted along the length of the targeting sequence. The targeting sequence or targeting molecule may be part of an RNA molecule that can form a complex with a CRISPR nuclease, either alone or in combination with other RNA molecules, with the targeting sequence serving as the targeting portion of the CRISPR complex. When the molecule having the targeting sequence is present contemporaneously with the CRISPR molecule, the RNA molecule, alone or in combination with an additional one or more RNA molecules (e.g. a tracrRNA molecule), is capable of targeting the CRISPR nuclease to the specific target sequence. As non-limiting example, a guide sequence portion of a CRISPR RNA molecule or single-guide RNA molecule may serve as a targeting molecule. Each possibility represents a separate embodiment. A targeting sequence can be custom designed to target any desired sequence.

[0044] The term “targets” as used herein, refers to preferentially hybridizing a targeting sequence of a targeting molecule to a nucleic acid having a targeted nucleotide sequence. It is understood that the term “targets” encompasses variable hybridization efficiencies, such that there is preferential targeting of the nucleic acid having the targeted nucleotide sequence, but unintentional off-target hybridization in addition to on-target hybridization might also occur. It is understood that where an RNA molecule targets a sequence, a complex of the RNA molecule and a CRISPR nuclease molecule targets the sequence for nuclease activity.

[0045] The “guide sequence portion” of an RNA molecule refers to a nucleotide sequence that is capable of hybridizing to a specific target DNA sequence, e.g., the guide sequence portion has a nucleotide sequence which is partially or fully complementary to the DNA sequence being targeted along the length of the guide sequence portion. In some embodiments, the guide sequence portion is 17, 18, 19, 20, 21, 22, 23, 24, 25, 26, 27, 28, 29, 30, 31, 32, 33, 34, 35, 36, 37, 38, 39, 40, 41, 42, 43, 44, 45, 46, 47, 48, 49 or 50 nucleotides in length, or approximately 17-50, 17-49, 17-48, 17-47, 17-46, 17-45, 17-44, 17-43, 17-42, 17-41, 17-40, 17-39, 17-38, 17-37, 17-36, 17-35, 17-34, 17-33, 17-31, 17-30, 17-29, 17-28, 17-27, 17-26, 17-25, 17-24, 17-22, 17-21, 18-25, 18-24, 18-23, 18-22, 18-21, 19-25, 19-24, 19-23, 19-22, 19-21, 19-20, 20-22, 18-20, 20-21, 21-22, or 17-20 nucleotides in length. The entire length of the guide sequence portion is fully complementary to the DNA sequence being targeted along the length of the guide sequence portion. The guide sequence portion may be part of an RNA molecule that can form a complex with a CRISPR nuclease with the guide sequence portion serving as the DNA targeting portion of the CRISPR complex. When the DNA molecule having the guide sequence portion is present contemporaneously with the CRISPR molecule the RNA molecule is capable of targeting the CRISPR nuclease to the specific target DNA sequence. Each possibility represents a separate embodiment. An RNA molecule can be custom designed to target any desired sequence. Accordingly, a molecule comprising a “guide sequence portion” is a type of targeting molecule. In some embodiments, the guide sequence portion comprises a sequence that is the same as, or differs by no more than 1, 2, 3, 4, or 5 nucleotides from, a guide sequence portion described herein, e.g., a guide sequence set forth in any of SEQ ID NOs: 1-20640. Each possibility represents a separate embodiment. In some of these embodiments, the guide sequence portion is fully complementary to the target sequence, and comprises a sequence that is the same as a sequence set forth in any of SEQ ID NOs: 1-20640. Throughout this application, the terms “guide molecule,” “RNA guide molecule,” “guide RNA molecule,” and “gRNA molecule” are synonymous with a molecule comprising a guide sequence portion.

[0046] The term “non-discriminatory” as used herein refers to a guide sequence portion of an RNA molecule that targets a specific DNA sequence that is common both a mutant and functional allele of a gene.

[0047] In embodiments of the present invention, an RNA molecule comprises a guide sequence portion having 17-50 contiguous nucleotides containing nucleotides in the sequence set forth in any one of SEQ ID NOs: 1-20640.

[0048] The RNA molecule and or the guide sequence portion of the RNA molecule may contain modified nucleotides. Exemplary modifications to nucleotides / polynucleotides may be synthetic and encompass polynucleotides which contain nucleotides comprising bases other than the naturally occurring adenine, cytosine, thymine, uracil, or guanine bases. Modifications to polynucleotides include polynucleotides which contain synthetic, non-naturally occurring nucleosides e.g., locked nucleic acids. Modifications to polynucleotides may be utilized to increase or decrease stability of an RNA. An example of a modified polynucleotide is an mRNA containing 1-methyl pseudo-uridine. For examples of modified polynucleotides and their uses, see U.S. Pat. 8,278,036, PCT International Publication No. WO/2015/006747, and Weissman and Kariko (2015), hereby incorporated by reference.

[0049] As used herein, “contiguous nucleotides” set forth in a SEQ ID NO refers to nucleotides in a sequence of nucleotides in the order set forth in the SEQ ID NO without any intervening nucleotides.

[0050] In embodiments of the present invention, the guide sequence portion may be 25 nucleotides in length and contain 20-22 contiguous nucleotides in the sequence set forth in any one of SEQ ID NOs: 1-20640. In embodiments of the present invention, the guide sequence portion may be less than 22 nucleotides in length. For example, in embodiments of the present invention the guide sequence portion may be 17, 18, 19, 20, or 21 nucleotides in length. In such embodiments the guide sequence portion may consist of 17, 18, 19, 20, or 21 nucleotides, respectively, in the sequence of 17-22 contiguous nucleotides set forth in any one of SEQ ID NOs: 1-20640. For example, a guide sequence portion having 17 nucleotides in the sequence of 17 contiguous nucleotides set forth in SEQ ID NO: 20641 may consist of any one of the following nucleotide sequences (nucleotides excluded from the contiguous sequence are marked in strike-through):

[image]

[0051] In embodiments of the present invention, the guide sequence portion may be greater than 20 nucleotides in length. For example, in embodiments of the present invention the guide sequence portion may be 21, 22, 23, 24 or 25 nucleotides in length. In such embodiments the guide sequence portion comprises 17-50 nucleotides containing the sequence of 20, 21 or 22 contiguous nucleotides set forth in any one of SEQ ID NOs: 1-20640 and additional nucleotides fully complimentary to a nucleotide or sequence of nucleotides adjacent to the 3′ end of the target sequence, 5′ end of the target sequence, or both.

[0052] In embodiments of the present invention a CRISPR nuclease and an RNA molecule comprising a guide sequence portion form a CRISPR complex that binds to a target DNA sequence to effect cleavage of the target DNA sequence. CRISPR nucleases, e.g. Cpfl, may form a CRISPR complex comprising a CRISPR nuclease and RNA molecule without a further tracrRNA molecule. Alternatively, CRISPR nucleases, e.g. Cas9, may form a CRISPR complex between the CRISPR nuclease, an RNA molecule, and a tracrRNA molecule. A guide sequence portion, which comprises a nucleotide sequence that is capable of hybridizing to a specific target DNA sequence, and a sequence portion that participates in CRIPSR nuclease binding, e.g. a tracrRNA sequence portion, can be located on the same RNA molecule. Alternatively, a guide sequence portion may be located on one RNA molecule and a sequence portion that participates in CRIPSR nuclease binding, e.g. a tracrRNA portion, may located on a separate RNA molecule. A single RNA molecule comprising a guide sequence portion (e.g. a DNA-targeting RNA sequence) and at least one CRISPR protein-binding RNA sequence portion (e.g. a tracrRNA sequence portion), can form a complex with a CRISPR nuclease and serve as the DNA-targeting molecule. In some embodiments, a first RNA molecule comprising a DNA-targeting RNA portion, which includes a guide sequence portion, and a second RNA molecule comprising a CRISPR protein-binding RNA sequence interact by base pairing to form an RNA complex that targets the CRISPR nuclease to a DNA target site or, alternatively, are fused together to form an RNA molecule that complexes with the CRISPR nuclease and targets the CRISPR nuclease to a DNA target site.

[0053] In embodiments of the present invention, a RNA molecule comprising a guide sequence portion may further comprise the sequence of a tracrRNA molecule. Such embodiments may be designed as a synthetic fusion of the guide portion of the RNA molecule and the trans-activating crRNA (tracrRNA). (See Jinek et al., 2012). In such an embodiment, the RNA molecule is a single guide RNA (sgRNA) molecule. Embodiments of the present invention may also form CRISPR complexes utilizing a separate tracrRNA molecule and a separate RNA molecule comprising a guide sequence portion. In such embodiments the tracrRNA molecule may hybridize with the RNA molecule via basepairing and may be advantageous in certain applications of the invention described herein.

[0054] The term “tracr mate sequence” refers to a sequence sufficiently complementary to a tracrRNA molecule so as to hybridize to the tracrRNA via basepairing and promote the formation of a CRISPR complex. (See U.S. Pat. No. 8,906,616). In embodiments of the present invention, the RNA molecule may further comprise a portion having a tracr mate sequence.

[0055] A “gene,” for the purposes of the present disclosure, includes a DNA region encoding a gene product, as well as all DNA regions which regulate the production of the gene product, whether or not such regulatory sequences are adjacent to coding and/or transcribed sequences. Accordingly, a gene includes, but is not necessarily limited to, promoter sequences, terminators, translational regulatory sequences such as ribosome binding sites and internal ribosome entry sites, enhancers, silencers, insulators, boundary elements, replication origins, matrix attachment sites and locus control regions.

[0056] “Eukaryotic” cells include, but are not limited to, fungal cells (such as yeast), plant cells, animal cells, mammalian cells and human cells.

[0057] The term “nuclease” as used herein refers to an enzyme capable of cleaving the phosphodiester bonds between the nucleotide subunits of nucleic acid. A nuclease may be isolated or derived from a natural source. The natural source may be any living organism. Alternatively, a nuclease may be a modified or a synthetic protein which retains the phosphodiester bond cleaving activity. Gene modification can be achieved using a nuclease, for example a CRISPR nuclease.

[0058] As used herein, the term “HSC” refers to both hematopoietic stem cells and hematopoietic stem progenitor cells. Non-limiting examples of stem cells include bone marrow cells, myeloid progenitor cells, a multipotent progenitor cells, a lineage restricted progenitor cells.

[0059] As used herein, “progenitor cell” refers to a lineage cell that is derived from stem cell and retains mitotic capacity and multipotency (e.g., can differentiate or develop into more than one but not all types of mature lineage of cell). As used herein “hematopoiesis” or “hemopoiesis” refers to the formation and development of various types of blood cells (e.g., red blood cells, megakaryocytes, myeloid cells (e.g., monocytes, macrophages and neutrophil), and lymphocytes) and other formed elements in the body (e.g., in the bone marrow).

[0060] The term “single nucleotide polymorphism (SNP) position”, as used herein, refers to a position in which a single nucleotide DNA sequence variation occurs between members of a species, or between paired chromosomes in an individual. In the case that a SNP position exists at paired chromosomes in an individual, a SNP on one of the chromosomes is a “heterozygous SNP.” The term SNP position refers to the particular nucleic acid position where a specific variation occurs and encompasses both a sequence including the variation from the most frequently occurring base at the particular nucleic acid position (also referred to as “SNP” or alternative “ALT”) and a sequence including the most frequently occurring base at the particular nucleic acid position (also referred to as reference, or “REF”). Accordingly, the sequence of a SNP position may reflect a SNP (i.e. an alternative sequence variant relative to a consensus reference sequence within a population), or the reference sequence itself.

[0061] According to embodiments of the present invention, there is provided a method for modifying in a cell a mutant allele of the sterile alpha motif domain containing 9 (SAMD9) gene having a mutation associated with MIRAGE syndrome, the method comprising introducing to the cell a composition comprising:
[0062] at least one CRISPR nuclease or a sequence encoding a CRISPR nuclease; and
[0063] a first RNA molecule comprising a guide sequence portion having 17-50 nucleotides or a nucleotide sequence encoding the same,
wherein a complex of the CRISPR nuclease and the first RNA molecule affects a double strand break in the mutant allele of the SAMD9 gene.

[0064] In some embodiments, the first RNA molecule targets the CRISPR nuclease to the mutation associated with MIRAGE syndrome.

[0065] In some embodiments, the mutation associated with MIRAGE syndrome is any one of 7:93101391_C_G, 7:93101435_G_A, 7:93101512_C_T, 7:93101540_C_A, 7:93101615_T_C, 7:93101761_AGTT_A, 7:93101900_G_A, 7:93102220_C_T, 7:93102221_G_A, 7:93102242_G_T, 7:93102259_G_A, 7:93102368_T_C, 7:93102514_G_A, 7:93102593_G_A, 7:93102692_C_G, 7:93102717_G_T, 7:93103150_AT_GA, 7:93103151_T_C, 7:93103153_C_T, 7:93103178_C_T, 7:93103253_C_A, 7:93103393_C_T, 7:93103588_C_CT, 7:93103598_T_A, 7:93103628_G_A, 7:93103679_C_T, 7:93103765_G_A, 7:93103772_G_T, 7:93103793_C_T, 7:93103851_G_T, 7:93103900_A_G, 7:93103916_T_C, 7:93103933_G_T, 7:93103938_GT_G, 7:93104044_C_T, 7:93104176_A_G, 7:93104296_ATT_A, 7:93104449_T_A, 7:93104694_TAC_GCA, 7:93104695_AC_GA, 7:93104722_C_T, 7:93105043_A_G, 7:93105103_A_G, 7:93105122_G_A, 7:93105295_A_G, 7:93105436_C_T, 7:93105485_T_G, 7:93105638_G_A, 7:93105781_C_T, 7:93105965_CT_C, 7:93106002_GT_G, 7:93106003_T_A, and 7:93106096_A_G.

[0066] In some embodiments, the guide sequence portion of the first RNA molecule comprises 17-50 contiguous nucleotides containing nucleotides in the sequence set forth in any one of SEQ ID NOs: 1-20640 that targets a mutation associated with MIRAGE syndrome.

[0067] In some embodiments, the method further comprises introduction of a donor molecule for alteration of the SAMD9 mutant allele. In some embodiments, the donor molecule encodes a synthetic splice site (e.g. a splice acceptor or splice donor site) for insertion into the SAMD9 mutant allele.

[0068] In some embodiments, the first RNA molecule targets the CRISPR nuclease to a SNP position of the mutant allele.

[0069] In some embodiments, the SNP position is any one of rs201891812, rs73216083, rs542330750, rs7798225, rs10953089, rs10953090, rs10277338, rs71562815, rs12333976, rs3839837, rs10279499, rs78564070, rs6965201, rs6969691, rs2374627, rs12668221, rs28673511, rs10229795, rs7785869, rs67885698, rs6957832 and rs12704664.

[0070] In some embodiments, the guide sequence portion of the first RNA molecule comprises 17-50 contiguous nucleotides containing nucleotides in the sequence set forth in any one of SEQ ID NOs: 1-20640 that targets a SNP position of the mutant allele.

[0071] In some embodiments, the SNP position is in an exon of the SAMD9 mutant allele.

[0072] In some embodiments, the SNP position contains a heterozygous SNP.

[0073] In some embodiments, the method further comprises introducing to the cell a second RNA molecule comprising a guide sequence portion having 17-50 nucleotides or a nucleotide sequence encoding the same, wherein a complex of the second RNA molecule and a CRISPR nuclease affects a second double strand break in the SAMD9 gene.

[0074] In some embodiments, the guide sequence portion of the second RNA molecule comprises 17-50 contiguous nucleotides containing nucleotides in the sequence set forth in any one of SEQ ID NOs: 1-20640 other than the sequence of the first RNA molecule.

[0075] In some embodiments, the second RNA molecule comprises a non-discriminatory guide portion that targets both functional and mutated SAMD9 alleles.

[0076] In some embodiments, the second RNA molecule comprises a non-discriminatory guide portion that targets any one of a SAMD9 untranslated region (UTR), an intergenic region upstream of SAMD9, an intergenic region downstream of SAMD9, or Intron 2 of SAMD9.

[0077] In some embodiments, the second RNA molecule comprises a non-discriminatory guide portion that targets a sequence that is located within a genomic range selected from any one of 7:93100828 to 7:93101327, 7:93099521 to 7:93100020, 7:93099413 to 7:93099913, or 7:93106106 to 7:93106605.

[0078] In some embodiments, the second RNA molecule comprises a non-discriminatory guide portion that targets a sequence that is located up to 500 base pairs from the sequence targeted by the first RNA molecule.

[0079] In some embodiments, a portion of an exon is excised from the mutant allele of the SAMD9 gene.

[0080] In some embodiments, the first RNA molecule targets a SNP position in the 3′ UTR of the mutated allele, and the second RNA molecule comprises a non-discriminatory guide portion that targets downstream of a polyadenylation signal sequence that is common to both a functional allele and the mutant allele of the SAMD9 gene.

[0081] In some embodiments, the first RNA molecule targets a SNP position downstream of a polyadenylation signal of the mutated allele, and the second RNA molecule comprises a non-discriminatory guide portion that targets a sequence upstream of a polyadenylation signal that is common to both a functional allele and the mutant allele of the SAMD9 gene.

[0082] In some embodiments, the polyadenylation signal is excised from the mutant allele of the SAMD9 gene.

[0083] According to embodiments of the present invention, there is provided a modified cell obtained by the method of any one of the embodiments presented herein.

[0084] According to embodiments of the present invention, there is provided a first RNA molecule comprising a guide sequence portion having 17-50 contiguous nucleotides containing nucleotides in the sequence set forth in any one of SEQ ID NOs: 1-20640.

[0085] According to embodiments of the present invention, there is provided a composition comprising the first RNA molecule and at least one CRISPR nuclease.

[0086] In some embodiments, the composition further comprises a second RNA molecule comprising a guide sequence portion having 17-50 contiguous nucleotides, wherein the second RNA molecule targets a SAMD9 allele, and wherein the guide sequence portion of the second RNA molecule is a different sequence from the sequence of the guide sequence portion of the first RNA molecule.

[0087] In some embodiments, the guide sequence portion of the second RNA molecule comprises 17-50 contiguous nucleotides containing nucleotides in the sequence set forth in any one of SEQ ID NOs: 1-20640 other than the sequence of the first RNA molecule.

[0088] According to embodiments of the present invention, there is provided a method for inactivating a mutant SAMD9 allele in a cell, the method comprising delivering to the cell the composition of any one of the embodiments presented herein.

[0089] According to embodiments of the present invention, there is provided a method for treating MIRAGE syndrome, the method comprising delivering to a cell of a subject having MIRAGE syndrome the composition of any one of the embodiments presented herein.

[0090] According to embodiments of the present invention, there is provided use of any one of the compositions presented herein for inactivating a mutant SAMD9 allele in a cell, comprising delivering to the cell the composition of any one of the embodiments presented herein.

[0091] According to embodiments of the present invention, there is provided a medicament comprising the composition of any one of the embodiments presented herein for use in inactivating a mutant SAMD9 allele in a cell, wherein the medicament is administered by delivering to the cell the composition of any one of the embodiments presented herein.

[0092] According to embodiments of the present invention, there is provided use of the composition of any one of the embodiments presented herein for treating ameliorating or preventing MIRAGE syndrome, comprising delivering to a cell of a subject having or at risk of having MIRAGE syndrome the composition of any one of the embodiments presented herein.

[0093] According to embodiments of the present invention, there is provided a medicament comprising the composition of any one of the embodiments presented herein for use in treating ameliorating or preventing MIRAGE syndrome, wherein the medicament is administered by delivering to a cell of a subject having or at risk of having MIRAGE syndrome the composition of any one of the embodiments presented herein.

[0094] According to embodiments of the present invention, there is provided a kit for inactivating a mutant SAMD9 allele in a cell, comprising an RNA molecule of any one of the embodiments presented herein, a CRISPR nuclease, and/or a tracrRNA molecule; and instructions for delivering the RNA molecule; CRISPR nuclease, and/or the tracrRNA to the cell.

[0095] According to embodiments of the present invention, there is provided a kit for treating MIRAGE syndrome in a subject, comprising an RNA molecule of any one of the embodiments presented herein, a CRISPR nuclease, and/or a tracrRNA molecule; and instructions for delivering the RNA molecule; CRISPR nuclease, and/or the tracrRNA to a cell of a subject having or at risk of having MIRAGE syndrome.

[0096] According to embodiments of the present invention, there is provided a gene editing composition comprising an RNA molecule comprising a guide sequence portion having 17-50 contiguous nucleotides containing nucleotides in the sequence set forth in any one of SEQ ID NOs: 1-20640. In some embodiments, the RNA molecule further comprises a portion having a sequence which binds to a CRISPR nuclease. In some embodiments, the sequence which binds to a CRISPR nuclease is a tracrRNA sequence.

[0097] In some embodiments, the RNA molecule further comprises a portion having a tracr mate sequence.

[0098] In some embodiments, the RNA molecule may further comprise one or more linker portions.

[0099] According to embodiments of the present invention, an RNA molecule may be up to 1000, 900, 800, 700, 600, 500, 450, 400, 350, 300, 290, 280, 270, 260, 250, 240, 230, 220, 210, 200, 190, 180, 170, 160, 150, 140, 130, 120, 110, or 100 nucleotides in length. Each possibility represents a separate embodiment. In embodiments of the present invention, the RNA molecule may be 17 up to 300 nucleotides in length, 100 up to 300 nucleotides in length, 150 up to 300 nucleotides in length, 100 up to 500 nucleotides in length, 100 up to 400 nucleotides in length, 200 up to 300 nucleotides in length, 100 to 200 nucleotides in length, or 150 up to 250 nucleotides in length. Each possibility represents a separate embodiment.

[0100] According to some embodiments of the present invention, the composition further comprises a tracrRNA molecule.

[0101] The present disclosure provides a method for utilizing at least one naturally occurring nucleotide difference or polymorphism (e.g., single nucleotide polymorphism (SNP)) for distinguishing/discriminating between two alleles of a gene, one allele bearing a mutation such that it encodes a mutated protein causing a disease phenotype (“mutated allele”) and a particular sequence in a SNP position (SNP/REF), and the other allele encoding for a functional protein (“functional allele”). The method further comprises the step of knocking out expression of the mutated protein and allowing expression of the functional protein. In some embodiments, the method is for treating, ameliorating, or preventing a dominant negative genetic disorder.

[0102] According to some embodiments of the present invention, there is provided a method for inactivating a mutant SAMD9 allele in a cell, the method comprising delivering to the cell a composition comprising an RNA molecule comprising a guide sequence portion having 17-50 contiguous nucleotides containing nucleotides in the sequence set forth in any one of SEQ ID NOs: 1-20640 and a CRISPR nuclease.

[0103] According to some embodiments of the present invention, there is provided a method for treating MIRAGE syndrome, the method comprising delivering to a cell of a subject having MIRAGE syndrome a composition comprising an RNA molecule comprising a guide sequence portion having 17-50 contiguous nucleotides containing nucleotides in the sequence set forth in any one of SEQ ID NOs: 1-20640 and a CRISPR nuclease.

[0104] According to embodiments of the present invention, the composition comprises a second RNA molecule comprising a guide sequence portion having 17-50 contiguous nucleotides containing nucleotides in the sequence set forth in any one of SEQ ID NOs: 1-20640. In some embodiments, the 17-50 nucleotides of the guide sequence portion of the second RNA molecule are in a different sequence from the sequence of the guide sequence portion of the first RNA molecule.

[0105] According to embodiments of the present invention, at least one CRISPR nuclease and the RNA molecule or RNA molecules are delivered to the subject and/or cells substantially at the same time or at different times.

[0106] In some embodiments, a tracrRNA molecule is delivered to the subject and/or cells substantially at the same time or at different times as the CRISPR nuclease and RNA molecule or RNA molecules.

[0107] According to embodiments of the present invention, the first RNA molecule targets a SNP or disease-causing mutation in the exon or promoter of a mutated allele, and the second RNA molecule targets a SNP in an exon of the mutated allele, a SNP in an intron, or a sequence present in both the mutated or functional allele.

[0108] According to embodiments of the present invention, the first RNA molecule or the first and the second RNA molecules target a SNP in the promoter region, the start codon, or an untranslated region (UTR) of a mutated allele.

[0109] According to embodiments of the present invention, the first RNA molecule or the first and the second RNA molecules targets at least a portion of the promoter and/or the start codon and/or a portion of a UTR of a mutated allele.

[0110] According to embodiments of the present invention, the first RNA molecule targets a portion of the promoter, a first SNP in the promoter, or a SNP upstream to the promoter of a mutated allele and the second RNA molecule is targets a second SNP, which is downstream of the first SNP, and is in the promoter, in a UTR, or in an intron or in an exon of a mutated allele.

[0111] According to embodiments of the present invention, the first RNA molecule targets a SNP in the promoter, upstream of the promoter, or a UTR of a mutated allele and the second RNA molecule is designed to target a sequence which is present in an intron of both the mutated allele and the functional allele.

[0112] According to embodiments of the present invention, the first RNA molecule targets a SNP in an intron of a mutated allele, and wherein the second RNA molecule targets a SNP in an intron of the mutated allele, or a sequence in an intron present in both the mutated and functional allele.

[0113] According to embodiments of the present invention, the first RNA molecule targets a sequence upstream of the promotor which is present in both a mutated and functional allele and the second RNA molecule targets a SNP or disease-causing mutation in any location of the gene.

[0114] According to embodiments of the present invention, there is provided a method comprising removing an exon containing a disease-causing mutation from a mutated allele, wherein the first RNA molecule or the first and the second RNA molecules target regions flanking an entire exon or a portion of the exon.

[0115] According to embodiments of the present invention, there is provided a method comprising removing an exon or a portion thereof from a mutant SAMD9 allele, the entire open reading frame of a mutant SAMD9 allele, or removing the entire mutant SAMD9 allele.

[0116] According to embodiments of the present invention, the first RNA molecule targets a SNP or disease-causing mutation in an exon or promoter of a mutated allele, and wherein the second RNA molecule targets a SNP in the same exon of the mutated allele, a SNP in an intron, or a sequence in an intron present in both the mutated and functional allele.

[0117] According to embodiments of the present invention, the first RNA molecule or the first and the second RNA molecules target an alternative splicing signal sequence between an exon and an intron of a mutant SAMD9 allele.

[0118] According to embodiments of the present invention, the second RNA molecule is non-discriminatory targets a sequence present in both a mutated allele and a functional allele.

[0119] The compositions and methods of the present disclosure may be utilized for treating, preventing, ameliorating, or slowing progression of an autosomal dominant genetic disorder, such as MIRAGE syndrome.

[0120] In some embodiments, a mutated allele is deactivated by delivering to a cell an RNA molecule which targets a SNP in the promoter region, the start codon, or an untranslated region (UTR) of the mutated allele.

[0121] In some embodiments, a mutated allele is inactivated by removing at least a portion of the promoter, and/or removing the start codon, and/or a portion of the UTR, and/or a polyadenylation signal. In such embodiments one RNA molecule may be designed for targeting a first SNP in the promoter or upstream to the promoter and another RNA molecule is designed to target a second SNP, which is downstream of the first SNP, and is in the promoter, in the UTR, in an intron, or in an exon. Alternatively, one RNA molecule may be designed for targeting a SNP in the promoter, upstream of the promoter, or the UTR, and another RNA molecule is designed to target a sequence which is present in an intron of both the mutated allele and the functional allele. Alternatively, one RNA molecule may be designed for targeting a sequence upstream of the promotor which is present in both the mutated and functional allele and the other guide is designed to target a SNP or disease-causing mutation in any location of the gene e.g., in an exon, intron, UTR, or downstream of the promoter.

[0122] In some embodiments, the method of deactivating a mutated allele comprises an exon skipping step comprising removing an exon containing a disease-causing mutation from the mutated allele. Removing an exon containing a disease-causing mutation in the mutated allele requires two RNA molecules which target regions flanking the entire exon or a portion of the exon. Removal of an exon containing the disease-causing mutation may be designed to eliminate the disease-causing action of the protein while allowing for expression of the remaining protein product which retains some or all of the wild-type activity. The entire open reading frame or the entire gene can be excised using two RNA molecules flanking the region desired to be excised.

[0123] In some embodiments, the method of deactivating a mutated allele comprises delivering two RNA molecules to a cell, wherein one RNA molecule targets a SNP or disease-causing mutation in an exon or promoter of the mutated allele, and wherein the other RNA molecule targets a SNP in the same of the mutated allele, a SNP in an intron, or a sequence in an intron present in both the mutated or functional allele.

[0124] Any one of, or combination of, the above-mentioned strategies for deactivating a mutant allele may be used in the context of the invention.

[0125] In embodiments of the present invention, an RNA molecule is used to direct a CRISPR nuclease to an exon or a splice site of a mutated allele in order to create a double-stranded break (DSB), leading to insertion or deletion of nucleotides by inducing an error-prone non-homologous end-joining (NHEJ) mechanism and formation of a frameshift mutation in the mutated allele. The frameshift mutation may result in, for example, inactivation or knockout of the mutated allele by generation of an early stop codon in the mutated allele and to generation of a truncated protein or to nonsense-mediated mRNA decay of the transcript of the mutant allele. In further embodiments, one RNA molecule is used to direct a CRISPR nuclease to a promotor of a mutated allele.

[0126] In some embodiments, the method of deactivating a mutated allele further comprises enhancing activity of the functional protein such as by providing a protein/peptide, a nucleic acid encoding a protein/peptide, or a small molecule such as a chemical compound, capable of activating/enhancing activity of the functional protein.

[0127] According to some embodiments, the present disclosure provides an RNA sequence (also referred to as an ‘RNA molecule’) which binds to or associates with and/or directs an RNA-guided DNA nuclease e.g., a CRISPR nuclease, to a target sequence comprising at least one nucleotide which differs between a mutated allele and a functional allele (e.g., SNP) of a gene of interest (i.e., a sequence of the mutated allele which is not present in the functional allele).

[0128] In some embodiments, the method comprises contacting a mutated allele of a gene of interest with an allele-specific RNA molecule and a CRISPR nuclease e.g., a Cas9 protein, wherein the allele-specific RNA molecule and the CRISPR nuclease associate with a nucleotide sequence of the mutated allele of the gene of interest which differs by at least one nucleotide from a nucleotide sequence of a functional allele of the gene of interest, thereby modifying or knocking-out the mutated allele.

[0129] In some embodiments, the allele-specific RNA molecule and a CRISPR nuclease is introduced to a cell encoding the gene of interest. In some embodiments, the cell encoding the gene of interest is in a mammalian subject. In some embodiments, the cell encoding the gene of interest is in a plant.

[0130] In some embodiments, the mutated allele is an allele of SAMD9 gene. In some embodiments, the RNA molecule targets a SNP which co-exists with or is genetically linked to the mutated sequence associated with MIRAGE syndrome genetic disorder. In some embodiments, the RNA molecule targets a SNP which is highly prevalent in the population and exists in the mutated allele having the mutated sequence associated with MIRAGE syndrome genetic disorder and not in the functional allele of an individual subject to be treated. In some embodiments, a disease-causing mutation within a mutated SAMD9 allele is targeted.

[0131] In some embodiments, the SNP is within an exon of the gene of interest. In such embodiments, a guide sequence portion of an RNA molecule is designed to associate with a sequence of an exon of the gene of interest.

[0132] In some embodiments, SNP is within an intron or the exon of the gene of interest. In some embodiments, the SNP is in close proximity to the splice site between an intron and an exon. In some embodiments, the close proximity to a splice site is 1, 2, 3, 4, 5, 6, 7, 8, 9, 10, 11, 12, 13, 14, 15, 16, 17, 18, 19, or 20 nucleotides upstream or downstream to the splice site. Each possibility represents a separate embodiment of the present invention. In such embodiments, a guide sequence portion of an RNA molecule may be designed to associate with a sequence of the gene of interest which comprises the splice site.

[0133] In some embodiments, the method is utilized for treating a subject having a disease phenotype resulting from the heterozygote SAMD9 gene. In such embodiments, the method results in improvement, amelioration or prevention of the disease phenotype.

[0134] Embodiments of compositions described herein include at least one CRISPR nuclease, RNA molecule(s), and a tracrRNA molecule, being effective in a subject or cells at the same time. The at least one CRISPR nuclease, RNA molecule(s), and tracrRNA may be delivered substantially at the same time or can be delivered at different times but have effect at the same time. For example, this includes delivering the CRISPR nuclease to the subject or cells before the RNA molecule and/or tracrRNA is substantially extant in the subject or cells.

[0135] In some embodiments, the cell is a stem cell. In some embodiments, the cell is an embryonic stem cell. In some embodiments, the stem cell is a hematopoietic stem/progenitor cell (HSC).

### Dominant Genetic Disorders

[0136] One of skill in the art will appreciate that all subjects with any type of heterozygote genetic disorder (e.g., dominant genetic disorder) may be subjected to the methods described herein. In one embodiment, the present invention may be used to target a gene involved in, associated with, or causative of dominant genetic disorders such as, for example, MIRAGE syndrome. In some embodiments, the dominant genetic disorder is MIRAGE syndrome. In some embodiments, the target gene is the SAMD9 gene (Entrez Gene, gene ID No: 54809). Non-limiting examples of mutations previously characterized as gain of function mutations associated with MIRAGE syndrome phenotype include: 7:93101391_C_G, 7:93101435_G_A, 7:93101512_C_T, 7:93101540_C_A, 7:93101615_T_C, 7:93101761_AGTT_A, 7:93101900_G_A, 7:93102220_C_T, 7:93102221_G_A, 7:93102242_G_T, 7:93102259_G_A, 7:93102368_T_C, 7:93102514_G_A, 7:93102593_G_A, 7:93102692_C_G, 7:93102717_G_T, 7:93103150_AT_GA, 7:93103151_T_C, 7:93103153_C_T, 7:93103178_C_T, 7:93103253_C_A, 7:93103393_C_T, 7:93103588_C_CT, 7:93103598_T_A, 7:93103628_G_A, 7:93103679_C_T, 7:93103765_G_A, 7:93103772_G_T, 7:93103793_C_T, 7:93103851_G_T, 7:93103900_A_G, 7:93103916_T_C, 7:93103933_G_T, 7:93103938_GT_G, 7:93104044_C_T, 7:93104176_A_G, 7:93104296_ATT_A, 7:93104449_T_A, 7:93104694_TAC_GCA, 7:93104695_AC_GA, 7:93104722_C_T, 7:93105043_A_G, 7:93105103_A_G, 7:93105122_G_A, 7:93105295_A_G, 7:93105436_C_T, 7:93105485_T_G, 7:93105638_G_A, 7:93105781_C_T, 7:93105965_CT_C, 7:93106002_GT_G, 7:93106003_T_A, and 7:93106096_A_G.

[0137] SAMD9 editing strategies include, but are not limited to, (1) truncation; (2) inhibiting expression of a mutated SAMD9 allele; (3) excision of the mutated coding exon or polyadenylation signal; and (4) targeting a SAMD9 mutation to induce a frameshift; and (5) inducing homology directed repair (HDR) to introduce a synthetic splice site upstream of the coding exon with a donor molecule.

[0138] Truncation can be achieved by several approaches. For example, excision may be achieved by targeting the mutant SAMD9 allele with two different RNA molecules, e.g. single guide RNA molecules or “sgRNAs”. At least one RNA molecule is preferably allele-specific. Alternatively, truncation may also be achieved by targeting a SNP within the coding exon of a mutant SAMD9 allele using a single guide RNA molecule.

[0139] In another approach, truncation can be achieved by introducing a splice acceptor by HDR. A splice acceptor sequence can be introduced using, for example, a double-stranded donor oligonucleotide (dsODN) template that will be introduced in Intron 2 before the coding exon.

[0140] In another editing strategy, expression of a mutated SAMD9 allele may be inhibited. This can be achieved by excising the polyadenylation signal in the 3′UTR region, which leads to an unstable transcript.

[0141] According to embodiments of the present invention, there is provided an RNA molecule comprising a guide sequence portion (e.g., a targeting sequence) comprising a nucleotide sequence that is fully or partially complementary to a target sequence in a SNP position (REF/SNP sequence) located in or near a mutated allele of the SAMD9 gene. In some embodiments, the guide sequence portion of the RNA molecule consists of 16, 17, 18, 19, 20, 21, 22, 23, 24, 25, 26, or more than 26 nucleotides. In such embodiments, the guide sequence portion comprises a sequence that is the same as or differs by no more than 1, 2, or 3 nucleotides from a sequence set forth in Table 1. Each possibility represents a separate embodiment. In some embodiments the guide sequence portion is configured to target a CRISPR nuclease to a target sequence and provide a cleavage event, by a CRISPR nuclease complexed therewith, selected from a double-strand break and a single-strand break within 500, 400, 300, 200, 100, 50, 25, or 10 nucleotides of a SAMD9 target site. In some embodiments, the cleavage event enables non-sense mediated decay of the SAMD9 gene. In some embodiments, the RNA molecule is a guide RNA molecule such as a crRNA molecule or a single guide RNA molecule.

[0142] In some embodiments, the target sequence of a mutated allele of SAMD9 gene is altered (e.g., by introduction of an NHEJ-mediated indel (e.g., insertion or deletion), and results in reduction or elimination of expression of the gene product encoded by the mutant allele of SAMD9 gene. In some embodiments, the reduction or elimination of expression is due to non-sense mediated mRNA decay such as due to immature stop codon. In some embodiments, the reduction or elimination of expression is due to expression of a truncated form of the SAMD9 gene product. In some embodiments, the guide sequence portion is complementary to a target sequence in a SNP position located in the coding exon (Exon 3) or from 7, 30, or 50 base pairs upstream to 7, 30, or 50 base pairs downstream of the coding exon (Exon 3) of the mutated allele of the SAMD9 gene. Each possibility represents a separate embodiment. In such embodiments, the guide sequence portion comprises a sequence that targets a SNP position selected from: rs10279499, rs78564070, rs6965201, or rs6969691. In such embodiments, the guide sequence portion comprises a sequence that is the same as or differs by no more than 1, 2, or 3 nucleotides from a sequence selected from any of SEQ ID NOs: 9909-10964, 5744, 5746, 5765, 5772, 5776, 5780, 5786, 5789, 5791, 5796, 5798, 5815, 5818, 5825, 5840, 5843, 5845, 5852, 5854, 5869, 5872, 5880, 5891, 5899, 6678-6679, 6681, 6688, 6692, 6696, 6710, 6714, or 6722, or from a sequence set forth in any of the SEQ ID NOs listed as targeting rs10279499, rs78564070, rs6965201, or rs6969691 in Table 1.

[0143] In some embodiments, the guide sequence portion is complementary to target a pathogenic mutation located in the coding exon (Exon 3) of the mutated allele of the SAMD9 gene to reduce or eliminate expression of the mutated SAMD9 allele. In such embodiments, the guide sequence portion comprises a sequence that targets a mutation selected from: 7:93101391_C_G, 7:93101435_G_A, 7:93101512_C_T, 7:93101540_C_A, 7:93101615_T_C, 7:93101761_AGTT_A, 7:93101900_G_A, 7:93102220_C_T, 7:93102221_G_A, 7:93102242_G_T, 7:93102259_G_A, 7:93102368_T_C, 7:93102514_G_A, 7:93102593_G_A, 7:93102692_C_G, 7:93102717_G_T, 7:93103150_AT_GA, 7:93103151_T_C, 7:93103153_C_T, 7:93103178_C_T, 7:93103253_C_A, 7:93103393_C_T, 7:93103588_C_CT, 7:93103598_T_A, 7:93103628_G_A, 7:93103679_C_T, 7:93103765_G_A, 7:93103772_G_T, 7:93103793_C_T, 7:93103851_G_T, 7:93103900_A_G, 7:93103916_T_C, 7:93103933_G_T, 7:93103938_GT_G, 7:93104044_C_T, 7:93104176_A _G, 7:93104296_ATT_A, 7:93104449_T_A, 7:93104694_TAC_GCA, 7:93104695_AC_GA, 7:93104722_C_T, 7:93105043_A _G, 7:93105103_A_G, 7:93105122_G_A, 7:93105295_A_G, 7:93105436_C_T, 7:93105485_T_G, 7:93105638_G_A, 7:93105781_C_T, 7:93105965_CT_C, 7:93106002_GT_G, 7:93106003_T_A, and 7:93106096_A_G. In some embodiments, the reduction or elimination of expression is due to non-sense mediated mRNA decay such as due to immature stop codon. In some embodiments, the reduction or elimination of expression is due to expression of a truncated form of the SAMD9 gene product of the mutant allele. In some embodiments, a donor HDR is further introduced to correct the sequence of the mutant allele of the SAMD9 gene.

[0144] In some embodiments, the expression of the coding exon of a mutated allele of SAMD9 gene is eliminated by introducing a splice acceptor directly upstream of the coding exon (e.g., to intron 2) of the mutated allele. In some embodiments, the target sequence is a SNP position in intron 2 of a mutated allele of SAMD9 gene, to which a splice acceptor is introduced such as by HDR following DSB by a RNA targeted DNA Nuclease, this results in reduction or elimination of expression of the gene product encoded by the mutant allele of SAMD9 gene. In such embodiments, the SNP position in intron 2 is any one of: rs2374627, rs12668221, rs28673511, rs10229795, rs7785869, rs67885698, rs6957832, or rs12704664. In such embodiments, the first guide sequence portion comprises a sequence that is the same as or differs by no more than 1, 2, or 3 nucleotides from a sequence set forth in any of the SEQ ID NOs listed as targeting rs2374627, rs12668221, rs28673511, rs10229795, rs7785869, rs67885698, rs6957832, or rs12704664 in Table 1. A person skilled in the art will appreciate that many splice acceptor sequences can be utilized.

[0145] In some embodiments, the coding exon of a mutated allele of SAMD9 gene is completely or partially excised to reduce or eliminate expression of the mutant allele of the SAMD9 gene. In such embodiments at least two different guide sequence portions are utilized, a first guide sequence portion is a discriminatory guide targeting only a mutated allele of the SAMD9 gene, and a second guide sequence portion is non-discriminatory and targets non-coding regions of both alleles of the SAMD9 gene.

[0146] In some embodiments, the first guide sequence portion is complementary to a target sequence in a SNP position located in intron 2 of the mutated allele of the SAMD9 gene, and the second guide sequence portion is complementary to a target sequence in the 3′ UTR or in the intergenic region of the SAMD9 gene. In such embodiments, the SNP position is any one of rs2374627, rs12668221, rs28673511, rs10229795, rs7785869, rs67885698, rs6957832, or rs12704664. In such embodiments, the first guide sequence portion comprises a sequence that is the same as or differs by no more than 1, 2, or 3 nucleotides from a sequence set forth in any of the SEQ ID NOs listed as targeting rs2374627, rs12668221, rs28673511, rs10229795, rs7785869, rs67885698, rs6957832, or rs12704664 in Table 1.

[0147] In some embodiments, the first guide sequence portion is complementary to a target sequence in a SNP position located in intergenic region of the mutated allele of the SAMD9 gene, and the second guide sequence portion is complementary to a target sequence in intron 2 of the SAMD9 gene. In such embodiments, the SNP position is any one of: rs71562815, rs12333976, rs3839837, rs201891812, rs73216083, rs542330750, rs7798225, rs10953089, rs10953090, or rs10277338. In such embodiments, the first guide sequence portion comprises a sequence that is the same as or differs by no more than 1, 2, or 3 nucleotides from a sequence set forth in any of the SEQ ID NOs listed as targeting rs71562815, rs12333976, rs3839837, rs201891812, rs73216083, rs542330750, rs7798225, rs10953089, rs10953090, or rs10277338 in Table 1. In such embodiments, the second guide sequence portion comprises a sequence that is the same as or differs by no more than 1, 2, or 3 nucleotides from a sequence set forth in any of SEQ ID Nos: 18323-20640, or from the SEQ ID NOs listed as targeting intron 2 of the SAMD9 gene in Table 1.

[0148] In some embodiments, the first guide sequence portion is complementary to a target sequence in a SNP position located in 3′ UTR of the mutated allele of the SAMD9 gene, and the second guide sequence portion is complementary to a target sequence in intron 2 of the SAMD9 gene. In such embodiments, the SNP position in the 3′UTR is any one of rs71562815, rs12333976, or rs3839837. In such embodiments, the first guide sequence portion comprises a sequence that is the same as or differs by no more than 1, 2, or 3 nucleotides from a sequence set forth in any of SEQ ID Nos: 9471-9908, or from the SEQ ID NOs listed as targeting rs71562815, rs12333976, or rs3839837 in Table 1. In such embodiments, the second guide sequence portion comprises a sequence that is the same as or differs by no more than 1, 2, or 3 nucleotides from a sequence set forth in any of SEQ ID Nos: 18323-20640.

[0149] In some embodiments, the polyadenylation signal (PolyAS) of SAMD9 gene of the mutated allele of the SAMD9 gene is completely or partially excised to destabilize the mutated allele to reduce or eliminate expression of the mutant allele.

[0150] In some embodiments, the first guide sequence portion is complementary to a target sequence in a SNP position located in 3′ UTR of the mutated allele of the SAMD9 gene, and the second guide sequence portion is complementary to a target sequence in the intergenic region of the SAMD9 gene. In such embodiments, the SNP position in the 3′UTR is any one of rs71562815, rs12333976, or rs3839837. In such embodiments, the first guide sequence portion comprises a sequence that is the same as or differs by no more than 1, 2, or 3 nucleotides from a sequence set forth in any of SEQ ID Nos: 9471-9908, or from the SEQ ID NOs listed as targeting rs71562815, rs12333976, or rs3839837 in Table 1.

[0151] In some embodiments, the first guide sequence portion is complementary to a target sequence in a SNP position located in intergenic region of the mutated allele of the SAMD9 gene, and the second guide sequence portion is complementary to a target sequence in the 3′ UTR of the SAMD9 gene. In such embodiments, the SNP position in the intergenic region is any one of rs71562815, rs12333976, rs3839837, rs201891812, rs73216083, rs542330750, rs7798225, rs10953089, rs10953090, or rs10277338. In such embodiments, the first guide sequence portion comprises a sequence that is the same as or differs by no more than 1, 2, or 3 nucleotides from a sequence set forth in any of the SEQ ID NOs listed as targeting rs71562815, rs12333976, rs3839837, rs201891812, rs73216083, rs542330750, rs7798225, rs10953089, rs10953090, or rs10277338 in Table 1. In such embodiments, the second guide sequence portion comprises a sequence that is the same as or differs by no more than 1, 2, or 3 nucleotides from a sequence set forth in any of SEQ ID Nos: 12756-17909, or from the SEQ ID NOs listed as targeting the 3′ UTR of the SAMD9 gene in Table 1.

### CRISPR Nucleases and PAM Recognition

[0152] In some embodiments, the sequence specific nuclease is selected from CRISPR nucleases, or a functional variant thereof. In some embodiments, the sequence specific nuclease is an RNA guided DNA nuclease. In such embodiments, the RNA sequence which guides the RNA guided DNA nuclease (e.g., Cpfl) binds to and/or directs the RNA guided DNA nuclease to the sequence comprising at least one nucleotide which differs between a mutated allele and its counterpart functional allele (e.g., SNP). In some embodiments, the CRISPR complex does not further comprise a tracrRNA. In a non-limiting example, in which the RNA guided DNA nuclease is a CRISPR protein, the at least one nucleotide which differs between the dominant mutated allele and the functional allele may be within the PAM site and/or proximal to the PAM site within the region that the RNA molecule is designed to hybridize to. A skilled artisan will appreciate that RNA molecules can be engineered to bind to a target of choice in a genome by commonly known methods in the art.

[0153] The term “PAM” as used herein refers to a nucleotide sequence of a target DNA located in proximity to the targeted DNA sequence and recognized by the CRISPR nuclease complex. The PAM sequence may differ depending on the nuclease identity. In addition, there are CRISPR nucleases that can target almost all PAMs. In some embodiments of the present invention, a CRISPR system utilizes one or more RNA molecules having a guide sequence portion to direct a CRISPR nuclease to a target DNA site via Watson-Crick base-pairing between the guide sequence portion and the protospacer on the target DNA site, which is next to the protospacer adjacent motif (PAM), which is an additional requirement for target recognition. The CRISPR nuclease then mediates cleavage of the target DNA site to create a double-stranded break within the protospacer. In a non-limiting example, a type II CRISPR system utilizes a mature crRNA:tracrRNA complex that directs the CRISPR nuclease, e.g. Cas9 to the target DNA the target DNA via Watson-Crick base-pairing between the guide sequence portion of the crRNA and the protospacer on the target DNA next to the protospacer adjacent motif (PAM). A skilled artisan will appreciate that each of the engineered RNA molecule of the present invention is further designed such as to associate with a target genomic DNA sequence of interest next to a protospacer adjacent motif (PAM), e.g., a PAM matching the sequence relevant for the type of CRISPR nuclease utilized, such as for a non-limiting example, NGG or NAG, wherein “N” is any nucleobase, for Streptococcus pyogenes Cas9 WT (SpCAS9); NNGRRT for Staphylococcus aureus (SaCas9); NNNVRYM for Jejuni Cas9 WT; NGAN or NGNG for SpCas9-VQR variant; NGCG for SpCas9-VRER variant; NGAG for SpCas9-EQR variant; NRRH for SpCas9-NRRH variant, wherein N is any nucleobase, R is A or G and H is A, C, or T; NRTH for SpCas9-NRTH variant, wherein N is any nucleobase, R is A or G and H is A, C, or T; NRCH for SpCas9-NRCH variant, wherein N is any nucleobase, R is A or G and H is A, C, or T; NG for SpG variant of SpCas9 wherein N is any nucleobase; NG or NA for SpCas9-NG variant of SpCas9 wherein N is any nucleobase; NR or NRN or NYN for SpRY variant of SpCas9, wherein N is any nucleobase, R is A or G and Y is C or T; NNG for Streptococcus canis Cas9 variant (ScCas9), wherein N is any nucleobase; NNNRRT for SaKKH-Cas9 variant of Staphylococcus aureus (SaCas9), wherein N is any nucleobase, and R is A or G; NNNNGATT for Neisseria meningitidis (NmCas9), wherein N is any nucleobase; TTN for Alicyclobacillus acidiphilus Cas12b (AacCas12b), wherein N is any nucleobase; or TTTV for Cpfl, wherein V is A, C or G. RNA molecules of the present invention are each designed to form complexes in conjunction with one or more different CRISPR nucleases and designed to target polynucleotide sequences of interest utilizing one or more different PAM sequences respective to the CRISPR nuclease utilized.

[0154] In some embodiments, an RNA-guided DNA nuclease e.g., a CRISPR nuclease, may be used to cause a DNA break, either double or single-stranded in nature, at a desired location in the genome of a cell. The most commonly used RNA-guided DNA nucleases are derived from CRISPR systems, however, other RNA-guided DNA nucleases are also contemplated for use in the genome editing compositions and methods described herein. For instance, see U.S. Pat. Publication No. 2015/0211023, incorporated herein by reference.

[0155] CRISPR systems that may be used in the practice of the invention vary greatly. CRISPR systems can be a type I, a type II, or a type III system. Non- limiting examples of suitable CRISPR proteins include Cas3, Cas4, Cas5, Cas5e (or CasD), Cas6, Cas6e, Cas6f, Cas7, Cas8al, Cas8a2, Cas8b, Cas8c, Cas9, Cas10, Cas1 Od, CasF, CasG, CasH, Csy1, Csy2, Csy3, Csel (or CasA), Cse2 (or CasB), Cse3 (or CasE), Cse4 (or CasC), Cscl, Csc2, Csa5, Csn2, Csm2, Csm3, Csm4, Csm5, Csm6, Cmrl, Cmr3, Cmr4, Cmr5, Cmr6, Csbl, Csb2, Csb3,Csxl7, Csxl4, Csxl0, Csxl6, CsaX, Csx3, Cszl, Csxl5, Csf1, Csf2, Csf3, Csf4, and Cul966.

[0156] In some embodiments, the RNA-guided DNA nuclease is a CRISPR nuclease derived from a type II CRISPR system (e.g., Cas9). The CRISPR nuclease may be derived from Streptococcus pyogenes, Streptococcus thermophilus, Streptococcus sp., Staphylococcus aureus, Neisseria meningitidis, Treponema denticola, Nocardiopsis dassonvillei, Streptomyces pristinaespiralis, Streptomyces viridochromogenes, Streptomyces viridochromogenes, Streptosporangium roseum, Streptosporangium roseum, Alicyclobacillus acidocaldarius, Bacillus pseudomycoides, Bacillus selenitireducens, Exiguobacterium sibiricum, Lactobacillus delbrueckii, Lactobacillus salivarius, Microscilla marina, Burkholderiales bacterium, Polaromonas naphthalenivorans, Polaromonas sp., Crocosphaera watsonii, Cyanothece sp., Microcystis aeruginosa, Synechococcus sp., Acetohalobium arabaticum, Ammonifex degensii, Caldicelulosiruptor becscii, Candidatus Desulforudis, Clostridium botulinum, Clostridium difficile, Finegoldia magna, Natranaerobius thermophilus, Pelotomaculumthermopropionicum, Acidithiobacillus caldus, Acidithiobacillus ferrooxidans, Allochromatium vinosum, Marinobacter sp., Nitrosococcus halophilus, Nitrosococcus watsoni, Pseudoalteromonas haloplanktis, Ktedonobacter racemifer, Methanohalobium evestigatum, Anabaena variabilis, Nodularia spumigena, Nostoc sp., Arthrospira maxima, Arthrospira platensis, Arthrospira sp., Lyngbya sp., Microcoleus chthonoplastes, Oscillatoria sp., Petrotoga mobilis, Thermosipho africanus, Acaryochloris marina, or any species which encodes a CRISPR nuclease with a known PAM sequence. CRISPR nucleases encoded by uncultured bacteria may also be used in the context of the invention. (See Burstein et al. Nature, 2017). Variants of CRIPSR proteins having known PAM sequences e.g., SpCas9 D1135E variant, SpCas9 VQR variant, SpCas9 EQR variant, or SpCas9 VRER variant may also be used in the context of the invention.

[0157] Thus, an RNA guided DNA nuclease of a CRISPR system, such as a Cas9 protein or modified Cas9 or homolog or ortholog of Cas9, or other RNA guided DNA nucleases belonging to other types of CRISPR systems, such as Cpfl and its homologs and orthologs, may be used in the compositions of the present invention. Additional CRISPR nucleases may also be used, for example, the nucleases described in PCT International Application Publication Nos. WO2020/223514 and WO2020/223553, which are hereby incorporated by reference.

[0158] In certain embodiments, the CRIPSR nuclease may be a “functional derivative” of a naturally occurring Cas protein. A “functional derivative” of a native sequence polypeptide is a compound having a qualitative biological property in common with a native sequence polypeptide. “Functional derivatives” include, but are not limited to, fragments of a native sequence and derivatives of a native sequence polypeptide and its fragments, provided that they have a biological activity in common with a corresponding native sequence polypeptide. A biological activity contemplated herein is the ability of the functional derivative to hydrolyze a DNA substrate into fragments. The term “derivative” encompasses both amino acid sequence variants of polypeptide, covalent modifications, and fusions thereof. Suitable derivatives of a Cas polypeptide or a fragment thereof include but are not limited to mutants, fusions, covalent modifications of Cas protein or a fragment thereof. Cas protein, which includes Cas protein or a fragment thereof, as well as derivatives of Cas protein or a fragment thereof, may be obtainable from a cell or synthesized chemically or by a combination of these two procedures. The cell may be a cell that naturally produces Cas protein, or a cell that naturally produces Cas protein and is genetically engineered to produce the endogenous Cas protein at a higher expression level or to produce a Cas protein from an exogenously introduced nucleic acid, which nucleic acid encodes a Cas that is same or different from the endogenous Cas. In some cases, the cell does not naturally produce Cas protein and is genetically engineered to produce a Cas protein.

[0159] In some embodiments, the CRISPR nuclease is Cpfl. Cpfl is a single RNA-guided endonuclease which utilizes a T-rich protospacer-adjacent motif. Cpfl cleaves DNA via a staggered DNA double-stranded break. Two Cpfl enzymes from Acidaminococcus and Lachnospiraceae have been shown to carry out efficient genome-editing activity in human cells. (See Zetsche et al., 2015).

[0160] Thus, an RNA guided DNA nuclease of a Type II CRISPR System, such as a Cas9 protein or modified Cas9 or homologs, orthologues, or variants of Cas9, or other RNA guided DNA nucleases belonging to other types of CRISPR systems, such as Cpfl and its homologs, orthologues, or variants, may be used in the present invention.

[0161] In some embodiments, the guide molecule comprises one or more chemical modifications which imparts a new or improved property (e.g., improved stability from degradation, improved hybridization energetics, or improved binding properties with an RNA guided DNA nuclease). Suitable chemical modifications include, but are not limited to: modified bases, modified sugar moieties, or modified inter-nucleoside linkages. Non-limiting examples of suitable chemical modifications include: 4-acetylcytidine, 5-(carboxyhydroxymethyl)uridine, 2′-O-methylcytidine, 5-carboxymethylaminomethyl-2-thiouridine, 5-carboxymethylammomethyluridine, dihydrouridine, 2′-O-methylpseudouridine, “beta, D-galactosylqueuosine”, 2′-O-methylguanosine, inosine, N6-isopentenyladenosine, 1-methyladenosine, 1-methylpseudouridine, 1-methylguanosine, 1-methylinosine, “2,2-dimethylguanosine”, 2-methyladenosine, 2-methylguanosine, 3-methylcytidine, 5-methylcytidine, N6-methyladenosine, 7-methylguanosine, 5-methylaminomethylundine, 5-methoxyaminomethyl-2-thiouridine, “beta, D-mannosylqueuosine”, 5-methoxycarbonylmethyl-2-thiouridine, 5-methoxycarbonylmethyluridine, 5-methoxyuridine, 2-methylthio-N6-isopentenyladenosine, N-((9-beta-D-ribofuranosyl-2-methylthiopurine-6-yl)carbamoyl)threonine, N-((9-beta-D-ribofuranosylpurine-6-yl)N-methylcarbamoyl)threonine, uridine-5-oxyacetic acid-methylester, uridine-5-oxyacetic acid, wybutoxosine, queuosine, 2-thiocytidine, 5-methyl-2-thiouridine, 2-thiouridine, 4-thiouridine, 5-methyluridine, N-((9-beta-D-ribofmanosylpurine-6-yl)-carbamoyl)threonine, 2′-O-methyl-5-methyluridine, 2′-O-methyluridine, wybutosine, “3-(3-amino-3-carboxy-propyl)uridine, (acp3)u”, 2′-0-methyl (M), 3′-phosphorothioate (MS), 3′-thioPACE (MSP), pseudouridine, or 1-methyl pseudo-uridine. Each possibility represents a separate embodiment of the present invention.

### Guide Sequences Which Specifically Target a Mutant Allele

[0162] A given gene may contain thousands of SNPs. Utilizing a 25 base pair target window for targeting each SNP in a gene would require hundreds of thousands of guide sequences. Any given guide sequence when utilized to target a SNP may result in degradation of the guide sequence, limited activity, no activity, or off-target effects. Accordingly, suitable guide sequences are necessary for targeting a given gene. By the present invention, a novel set of guide sequences have been identified for knocking out expression of a mutated SAMD9 protein, inactivating a mutant SAMD9 gene allele, and treating MIRAGE syndrome.

[0163] The present disclosure provides guide sequences capable of specifically targeting a mutated allele for inactivation while leaving the functional allele unmodified. The guide sequences of the present invention are designed to, and are most likely to, specifically differentiate between a mutated allele and a functional allele. Of all possible guide sequences which target a mutated allele desired to be inactivated, the specific guide sequences disclosed herein are specifically effective to function with the disclosed embodiments.

[0164] Briefly, the guide sequences may have properties as follows: (1) target SNP/insertion/deletion/indel with a high prevalence in the general population, in a specific ethnic population or in a patient population is above 1% and the SNP/insertion/deletion/indel heterozygosity rate in the same population is above 1%; (2) target a location of a SNP/insertion/deletion/indel proximal to a portion of the gene e.g., within 5k bases of any portion of the gene, for example, a promoter, a UTR, an exon or an intron; and (3) target a mutant allele using an RNA molecule which targets a founder or common pathogenic mutations for the disease/gene. In some embodiments, the prevalence of the SNP/insertion/deletion/indel in the general population, in a specific ethnic population or in a patient population is above 1%, 2%, 3%, 4%, 5%, 6%, 7%, 8%, 9%, 10%, 11%, 12%, 13%, 14%, or 15% and the SNP/insertion/deletion/indel heterozygosity rate in the same population is above 1%, 2%, 3%, 4%, 5%, 6%, 7%, 8%, 9%, 10%, 11%, 12%, 13%, 14%, or 15%. Each possibility represents a separate embodiment and may be combined at will.

[0165] For each gene, according to SNP/insertion/deletion/indel any one of the following strategies may be used to deactivate the mutated allele: (1) Knockout strategy using one RNA molecule - one RNA molecule is utilized to direct a CRISPR nuclease to a mutated allele and create a double-strand break (DSB) leading to formation of a frameshift mutation in an exon or in a splice site region of the mutated allele, or alternatively one RNA molecule is utilized to target an intron of a mutated allele leading to introduction of a synthetic splice donor by HDR; (2) Excision of the coding exon using two RNA molecules, for example, a first RNA molecule targets a SNP position of an exon of the mutated allele and a second, non-discriminatory RNA molecule targets a sequence within flanking the exon; (3) Excision of the polyadenylation signal using two RNA molecules, for example, a first RNA molecule targets a SNP position in the 3′UTR and a second, non-discriminatory RNA molecule targets a sequences downstream of the polyadenylation signal. Alternatively, the first RNA molecule targets a SNP position located downstream of the polyadenylation signal and the second, non-discriminatory RNA molecule targets a sequence upstream of the polyadenylation signal.

[0166] Based on the locations of identified SNPs/insertions/deletions/indels for each mutant allele, any one of, or a combination of, the above-mentioned methods to deactivate the mutant allele may be utilized.

[0167] In some embodiments of the present invention, one RNA molecule is used to target a SNP, and the location of the SNP is in an exon or in close proximity (e.g., within 20 base pairs) to a splice site between an intron and an exon. In some embodiments, two RNA molecules are used and may target two SNPs, such that the first SNP is upstream of the first exon e.g., within the 5′ untranslated region, within the promoter, or within the first two kilobases 5′ of the transcription start site, and the second SNP is downstream of the first SNP e.g., within the first two kilobases 5′ of the transcription start site, within an intron, or within an exon.

[0168] Guide sequences of the present invention may target a SNP in the upstream portion of the targeted gene, preferably upstream of the last exon of the targeted gene. Guide sequences may target a SNP upstream to the first exon, for example within the 5′ untranslated region, within the promoter, or within the first 4-5 kilobases 5′ of the transcription start site.

[0169] Guide sequences of the present invention may also target a SNP within close proximity (e.g., within 50 base pairs, more preferably with 20 base pairs) to a known protospacer adjacent motif (PAM) site.

[0170] Guide sequences of the present invention may: (1) target a heterozygous SNP for the targeted gene; (2) target a heterozygous SNP upstream or downstream of the gene; (3) target a SNP with a prevalence of the SNP/insertion/deletion/indel in the general population, in a specific ethnic population, or in a patient population above 1%; (4) have a guanine-cytosine content of greater than 30% and less than 85%; (5) have no repeat of four or more thymine/uracil or eight or more guanine, cytosine, or adenine; and (6) have low or no off-targeting identified by off-target analysis. Guide sequences of the present invention may satisfy any one of the above criteria and are most likely to differentiate between a mutated allele from its corresponding functional allele.

[0171] In some embodiments of the present invention, a SNP targeted by an RNA molecule may be upstream or downstream of the gene. In some embodiments of the present invention, the SNP is within 4,000 base pairs of the gene.

[0172] in some embodiments of the present invention, at least one nucleotide which differs between the mutated allele and the functional allele is upstream, downstream or within the sequence of the disease-causing mutation of the gene of interest. The at least one nucleotide which differs between the mutated allele and the functional allele may be within an exon or within an intron of the gene of interest. In some embodiments, the at least one nucleotide which differs between the mutated allele and the functional allele is within an exon of the gene of interest. In some embodiments, the at least one nucleotide which differs between the mutated allele and the functional allele is within an intron or the exon of the gene of interest, in close proximity to the splice site between the intron and the exon e.g., 1, 2, 3, 4, 5, 6, 7, 8, 9, 10, 11, 12, 13, 14, 15, 16, 17, 18, 19, 20, 21, 22, 23, 24, 25, 26, 27, 28, 29 or 30 nucleotides upstream or downstream to the splice site. Each possibility represents a separate embodiment.

[0173] In some embodiments, the at least one nucleotide is a single nucleotide polymorphism (SNP). In some embodiments, each of the nucleotide variants of the SNP may be expressed in the mutated allele. In some embodiments, the SNP may be a founder or common pathogenic mutation.

[0174] Guide sequences may target a SNP which has both (1) a high prevalence in the general population e.g., above 1% in the population; and (2) a high heterozygosity rate in the population, e.g., above 1%. Guide sequences may target a SNP that is globally distributed. A SNP may be a founder or common pathogenic mutation. In some embodiments, the prevalence in the general population is above 1%, 2%, 3%, 4%, 5%, 6%, 7%, 8%, 9%, 10%, 11%, 12%, 13%, 14%, or 15%. Each possibility represents a separate embodiment. In some embodiments, the heterozygosity rate in the population is above 1%, 2%, 3%, 4%, 5%, 6%, 7%, 8%, 9%, 10%, 11%, 12%, 13%, 14%, or 15%. Each possibility represents a separate embodiment.

[0175] In some embodiments, the at least one nucleotide which differs between the mutated allele and the functional allele is linked to/co-exists with the disease-causing mutation in high prevalence in a population. In such embodiments, “high prevalence” refers to at least 92%, 93%, 94%, 95%, 96%, 97%, 98%, 99%, or 100%. Each possibility represents a separate embodiment of the present invention. In one embodiment, the at least one nucleotide which differs between the mutated allele and the functional allele, is a disease-associated mutation. In some embodiments, the SNP is highly prevalent in the population. In such embodiments, “highly prevalent” refers to at least 10%, 11%, 12%, 13%, 14%, 15%, 20%, 30%, 40%, 50%, 60%, or 70% of a population. Each possibility represents a separate embodiment of the present invention.

### Delivery to Cells

[0176] The RNA molecule compositions described herein may be delivered to a target cell by any suitable means. RNA molecule compositions of the present invention may be targeted to any cell which contains and/or expresses a mutated allele, including any mammalian or plant cell. For example, in one embodiment the RNA molecule specifically targets a mutated SAMD9 allele and the target cell is an HSC. The delivery to the cell may be performed in-vitro, ex-vivo, or in-vivo. Further, the nucleic acid compositions described herein may be delivered as one or more of DNA molecules, RNA molecules, Ribonucleoproteins (RNP), nucleic acid vectors, or any combination thereof.

[0177] In some embodiments, the RNA molecule comprises a chemical modification. Non-limiting examples of suitable chemical modifications include 2′-0-methyl (M), 2′-0-methyl, 3′phosphorothioate (MS) or 2′-0-methyl, 3 ‘thioPACE (MSP), pseudouridine, and 1-methyl pseudouridine. Each possibility represents a separate embodiment of the present invention.

[0178] Any suitable viral vector system may be used to deliver nucleic acid compositions e.g., the RNA molecule compositions of the subject invention. Conventional viral and non-viral based gene transfer methods can be used to introduce nucleic acids and target tissues. In certain embodiments, nucleic acids are administered for in vivo or ex vivo gene therapy uses. Non-viral vector delivery systems include naked nucleic acid, and nucleic acid complexed with a delivery vehicle such as a liposome or poloxamer. For a review of gene therapy procedures, see Anderson (1992); Nabel & Felgner (1993); Mitani & Caskey (1993); Dillon (1993); Miller (1992); Van Brunt (1988); Vigne (1995); Kremer & Perricaudet (1995); Haddada et al. (1995); and Yu et al. (1994).

[0179] Methods of non-viral delivery of nucleic acids and/or proteins include electroporation, lipofection, microinjection, biolistics, particle gun acceleration, virosomes, liposomes, immunoliposomes, lipid nanoparticles (LNPs), polycation or lipid:nucleic acid conjugates, artificial virions, and agent-enhanced uptake of nucleic acids or can be delivered to plant cells by bacteria or viruses (e.g., Agrobacterium, Rhizobium sp. NGR234, Sinorhizoboiummeliloti, Mesorhizobium loti, tobacco mosaic virus, potato virus X, cauliflower mosaic virus and cassava vein mosaic virus). (See, e.g., Chung et al., 2006). Sonoporation using, e.g., the Sonitron 2000 system (Rich-Mar), can also be used for delivery of nucleic acids. Cationic-lipid mediated delivery of proteins and/or nucleic acids is also contemplated as an in vivo, ex vivo, or in vitro delivery method. (See Zuris et al. (2015); see also Coelho et al. (2013); Judge et al. (2006); and Basha et al. (2011)).

[0180] Non-viral vectors, such as transposon-based systems e.g. recombinant Sleeping Beauty transposon systems or recombinant PiggyBac transposon systems, may also be delivered to a target cell and utilized for transposition of a polynucleotide sequence of a molecule of the composition or a polynucleotide sequence encoding a molecule of the composition in the target cell.

[0181] Additional exemplary nucleic acid delivery systems include those provided by Amaxa.RTM. Biosystems (Cologne, Germany), Maxcyte, Inc. (Rockville, Md.), BTX Molecular Delivery Systems (Holliston, Mass.) and Copernicus Therapeutics Inc., (see, e.g., U.S. Pat. No. 6,008,336). Lipofection is described in e.g., U.S. Pat. No. 5,049,386, U.S. Pat. No. 4,946,787; and U.S. Pat. No. 4,897,355, and lipofection reagents are sold commercially (e.g., Transfectam.TM., Lipofectin.TM. and Lipofectamine.TM. RNAiMAX). Cationic and neutral lipids that are suitable for efficient receptor-recognition lipofection of polynucleotides include those disclosed in PCT International Publication Nos. WO/1991/017424 and WO/1991/016024. Delivery can be to cells (ex vivo administration) or target tissues (in vivo administration).

[0182] The preparation of lipid:nucleic acid complexes, including targeted liposomes such as immunolipid complexes, is well known to one of skill in the art (see, e.g., Crystal, Science (1995); Blaese et al., (1995); Behr et al., (1994); Remy et al. (1994); Gao and Huang (1995); Ahmad and Allen (1992); U.S. Pat. Nos. 4,186,183; 4,217,344; 4,235,871; 4,261,975; 4,485,054; 4,501,728; 4,774,085; 4,837,028; and 4,946,787).

[0183] Additional methods of delivery include the use of packaging the nucleic acids to be delivered into EnGeneIC delivery vehicles (EDVs). These EDVs are specifically delivered to target tissues using bispecific antibodies where one arm of the antibody has specificity for the target tissue and the other has specificity for the EDV. The antibody brings the EDVs to the target cell surface and then the EDV is brought into the cell by endocytosis. Once in the cell, the contents are released (See MacDiarmid et al., 2009).

[0184] The use of RNA or DNA viral based systems for viral mediated delivery of nucleic acids take advantage of highly evolved processes for targeting a virus to specific cells in the body and trafficking the viral payload to the nucleus. Viral vectors can be administered directly to patients (in vivo) or they can be used to treat cells in vitro and the modified cells are administered to patients (ex vivo). Conventional viral based systems for the delivery of nucleic acids include, but are not limited to, retroviral, lentivirus, adenoviral, adeno-associated, vaccinia and herpes simplex virus vectors for gene transfer.

[0185] The tropism of a retrovirus can be altered by incorporating foreign envelope proteins, expanding the potential target population of target cells. Lentiviral vectors are retroviral vectors that are able to transduce or infect non-dividing cells and typically produce high viral titers. Selection of a retroviral gene transfer system depends on the target tissue. Retroviral vectors are comprised of cis-acting long terminal repeats with packaging capacity for up to 6-10 kb of foreign sequence. The minimum cis-acting LTRs are sufficient for replication and packaging of the vectors, which are then used to integrate the therapeutic gene into the target cell to provide permanent transgene expression. Widely used retroviral vectors include those based upon murine leukemia virus (MuLV), gibbon ape leukemia virus (GaLV), Simian Immunodeficiency virus (SIV), human immunodeficiency virus (HIV), and combinations thereof (See, e.g., Buchschacher et al. (1992); Johann et al. (1992); Sommerfelt et al. (1990); Wilson et al. (1989); Miller et al. (1991); PCT International Publication No. WO/1994/026877A1).

[0186] At least six viral vector approaches are currently available for gene transfer in clinical trials, which utilize approaches that involve complementation of defective vectors by genes inserted into helper cell lines to generate the transducing agent.

[0187] pLASN and MFG-S are examples of retroviral vectors that have been used in clinical trials (See Dunbar et al., 1995; Kohn et al., 1995; Malech et al., 1997). PA317/pLASN was the first therapeutic vector used in a gene therapy trial (Blaese et al., 1995). Transduction efficiencies of 50% or greater have been observed for MFG-S packaged vectors. (Ellem et al., (1997); Dranoff et al., 1997).

[0188] Packaging cells are used to form virus particles that are capable of infecting a host cell. Such cells include 293 cells, which package adenovirus, AAV, and Psi-2 cells or PA317 cells, which package retrovirus. Viral vectors used in gene therapy are usually generated by a producer cell line that packages a nucleic acid vector into a viral particle. The vectors typically contain the minimal viral sequences required for packaging and subsequent integration into a host (if applicable), other viral sequences being replaced by an expression cassette encoding the protein to be expressed. The missing viral functions are supplied in trans by the packaging cell line. For example, AAV vectors used in gene therapy typically only possess inverted terminal repeat (ITR) sequences from the AAV genome which are required for packaging and integration into the host genome. Viral DNA is packaged in a cell line, which contains a helper plasmid encoding the other AAV genes, namely rep and cap, but lacking ITR sequences. The cell line is also infected with adenovirus as a helper. The helper virus promotes replication of the AAV vector and expression of AAV genes from the helper plasmid. The helper plasmid is not packaged in significant amounts due to a lack of ITR sequences. Contamination with adenovirus can be reduced by, e.g., heat treatment to which adenovirus is more sensitive than AAV. Additionally, AAV can be produced at clinical scale using baculovirus systems (see U.S. Pat. No. 7,479,554).

[0189] In many gene therapy applications, it is desirable that the gene therapy vector be delivered with a high degree of specificity to a particular tissue type. Accordingly, a viral vector can be modified to have specificity for a given cell type by expressing a ligand as a fusion protein with a viral coat protein on the outer surface of the virus. The ligand is chosen to have affinity for a receptor known to be present on the cell type of interest. For example, Han et al. (1995) reported that Moloney murine leukemia virus can be modified to express human heregulin fused to gp70, and the recombinant virus infects certain human breast cancer cells expressing human epidermal growth factor receptor. This principle can be extended to other virus-target cell pairs, in which the target cell expresses a receptor and the virus expresses a fusion protein comprising a ligand for the cell-surface receptor. For example, filamentous phage can be engineered to display antibody fragments (e.g., FAB or Fv) having specific binding affinity for virtually any chosen cellular receptor. Although the above description applies primarily to viral vectors, the same principles can be applied to nonviral vectors. Such vectors can be engineered to contain specific uptake sequences which favor uptake by specific target cells.

[0190] Gene therapy vectors can be delivered in vivo by administration to an individual patient, typically by systemic administration (e.g., intravitreal, intravenous, intraperitoneal, intramuscular, subdermal, or intracranial infusion) or topical application, as described below. Alternatively, vectors can be delivered to cells ex vivo, such as cells explanted from an individual patient (e.g., lymphocytes, bone marrow aspirates, tissue biopsy) or universal donor hematopoietic stem cells, followed by reimplantation of the cells into a patient, optionally after selection for cells which have incorporated the vector. A non-limiting exemplary ex vivo approach may involve removal of tissue (e.g., peripheral blood, bone marrow, and spleen) from a patient for culture, nucleic acid transfer to the cultured cells (e.g., hematopoietic stem cells), followed by grafting the cells to a target tissue (e.g., bone marrow, and spleen) of the patient. In some embodiments, the stem cell or hematopoietic stem cell may be further treated with a viability enhancer.

[0191] Ex vivo cell transfection for diagnostics, research, or for gene therapy (e.g., via re-infusion of the transfected cells into the host organism) is well known to those of skill in the art. In a preferred embodiment, cells are isolated from the subject organism, transfected with a nucleic acid composition, and re-infused back into the subject organism (e.g., patient). Various cell types suitable for ex vivo transfection are well known to those of skill in the art (See, e.g., Freshney, “Culture of Animal Cells, A Manual of Basic Technique and Specialized Applications (6th edition, 2010) and the references cited therein for a discussion of how to isolate and culture cells from patients).

[0192] Suitable cells include, but are not limited to, eukaryotic cells and/or cell lines. Non-limiting examples of such cells or cell lines generated from such cells include COS, CHO (e.g., CHO--S, CHO-K1, CHO-DG44, CHO-DUXB11, CHO-DUKX, CHOK1SV), VERO, MDCK, WI38, V79, B14AF28-G3, BHK, HaK, NSO, SP2/0-Ag14, HeLa, HEK293 (e.g., HEK293-F, HEK293-H, HEK293-T), perC6 cells, any plant cell (differentiated or undifferentiated), as well as insect cells such as Spodopterafugiperda (Sf), or fungal cells such as Saccharomyces, Pichia and Schizosaccharomyces. In certain embodiments, the cell line is a CHO-K1, MDCK or HEK293 cell line. Additionally, primary cells may be isolated and used ex vivo for reintroduction into the subject to be treated following treatment with a guided nuclease system (e.g. CRISPR/Cas). Suitable primary cells include peripheral blood mononuclear cells (PBMC), and other blood cell subsets such as, but not limited to, CD4+ T cells or CD8+ T cells. Suitable cells also include stem cells such as, by way of example, embryonic stem cells, induced pluripotent stem cells, hematopoietic stem cells (CD34+), neuronal stem cells and mesenchymal stem cells.

[0193] In one embodiment, stem cells are used in ex vivo procedures for cell transfection and gene therapy. The advantage to using stem cells is that they can be differentiated into other cell types in vitro, or can be introduced into a mammal (such as the donor of the cells) where they will engraft in the bone marrow. Methods for differentiating CD34+ cells in vitro into clinically important immune cell types using cytokines such a GM-CSF, IFN-gamma, and TNF-alpha are known (as a non-limiting example see, Inaba et al., 1992).

[0194] Stem cells are isolated for transduction and differentiation using known methods. For example, stem cells are isolated from bone marrow cells by panning the bone marrow cells with antibodies which bind unwanted cells, such as CD4+ and CD8+ (T cells), CD45+(panB cells), GR-1 (granulocytes), and Iad (differentiated antigen presenting cells) (as a non-limiting example, see Inaba et al., 1992). Stem cells that have been modified may also be used in some embodiments.

[0195] Vectors (e.g., retroviruses, liposomes, etc.) containing therapeutic nucleic acid compositions can also be administered directly to an organism for transduction of cells in vivo. Administration is by any of the routes normally used for introducing a molecule into ultimate contact with blood or tissue cells including, but not limited to, injection, infusion, topical application (e.g., eye drops and cream) and electroporation. Suitable methods of administering such nucleic acids are available and well known to those of skill in the art, and, although more than one route can be used to administer a particular composition, a particular route can often provide a more immediate and more effective reaction than another route. According to some embodiments, the composition is delivered via IV injection.

[0196] Vectors suitable for introduction of transgenes into immune cells (e.g., T-cells) include non-integrating lentivirus vectors. See, e.g., U.S. Pat. Publication No. 2009/0117617.

[0197] Pharmaceutically acceptable carriers are determined in part by the particular composition being administered, as well as by the particular method used to administer the composition. Accordingly, there is a wide variety of suitable formulations of pharmaceutical compositions available, as described below (See, e.g., Remington’s Pharmaceutical Sciences, 17th ed., 1989).

[0198] In accordance with some embodiments, there is provided an RNA molecule which binds to/ associates with and/or directs the RNA guided DNA nuclease to a sequence comprising at least one nucleotide which differs between a mutated allele and a functional allele (e.g., SNP) of a gene of interest (i.e., a sequence of the mutated allele which is not present in the functional allele). The sequence may be within the disease associated mutation. The sequence may be upstream or downstream to the disease associated mutation. Any sequence difference between the mutated allele and the functional allele may be targeted by an RNA molecule of the present invention to inactivate the mutant allele, or otherwise disable its dominant disease-causing effects, while preserving the activity of the functional allele.

[0199] The disclosed compositions and methods may also be used in the manufacture of a medicament for treating dominant genetic disorders in a patient.

### Mechanisms of Action for SAMD9 Knockout Methods

[0200] Without being bound by any theory or mechanism, the instant invention may be utilized to apply a CRISPR nuclease to process a mutated pathogenic SAMD9 allele and not a functional SAMD9 allele, such as to prevent expression of the mutated pathogenic allele or to produce a truncated non-pathogenic peptide from the mutated pathogenic allele, in order to prevent MIRAGE syndrome. A specific guide sequence may be selected from Table 1 based on the targeted SNP and the type of CRISPR nuclease used (required PAM sequence).

[0201] The SAMD9 gene is located in chromosome 7 and encodes the SAMD9 protein. One optional strategy to knockout a mutated SAMD9 allele is to truncate it by targeting a SNP position in a coding exon of SAMD9 using one RNA molecule. Truncation may also be achieved by excision of an exon using two RNA molecules, wherein one of the RNA molecules targets an allele specific sequence in a SNP position and the other RNA molecule is a non-discriminatory guide that targets a sequence flanking the coding exon. Another optional strategy to knockout SAMD9 is by excision of its polyadenylation signal using a first RNA molecule to target a SNP position in the 3′UTR and a second, non-discriminatory RNA to target downstream of the polyadenylation signal. Alternatively, excision of the SAMD9 polyadenylation signal may be performed by using a first RNA molecule to target a SNP position located downstream of the polyadenylation signal and a second, non-discriminatory RNA molecule to target a sequence upstream of the polyadenylation signal. Excision of a portion of a mutated SAMD9 allele may also be achieved by mediating a DSB in an intron flanking the desired exon and a region downstream of the desired exon. Yet another optional strategy is to introduce by HDR a synthetic splice acceptor site in Intron 2, such that the coding exon is no longer expressed.

### Examples of RNA Guide Sequences Which Specifically Target Mutated Alleles of SAMD9 Gene

[0202] Disclosures which include sequences that may interact with a SARM1 sequence in some form include PCT International Application Publication Nos. WO2020/191171, WO2013/081864, WO2017/072590, WO2019/081982, WO2018/154412, Japanese Application Publication No. 2008/504843, and U.S. Publication Nos. 2006/0019284 and 2006/0003322, each of which are hereby incorporated by reference. Although a large number of guide sequences can be designed to target a mutated allele, the nucleotide sequences described in Tables 2 identified by SEQ ID NOs: 1-20640 below were specifically selected to effectively implement the methods set forth herein and to effectively discriminate between alleles.

[0203] Table 1 shows guide sequences designed for use as described in the embodiments above to associate with different SNPs or pathogenic mutations within a sequence of a mutated SAMD9 allele. Each engineered guide molecule is further designed such as to associate with a target genomic DNA sequence of interest that lies next to a protospacer adjacent motif (PAM), e.g., a PAM matching the sequence NGG or NAG, where “N” is any nucleobase. The guide sequences were designed to work in conjunction with one or more different CRISPR nucleases, including, but not limited to, e.g. SpCas9WT (PAM SEQ: NGG), SpCas9.VQR.1 (PAM SEQ: NGAN), SpCas9.VQR.2 (PAM SEQ: NGNG), SpCas9.EQR (PAM SEQ: NGAG), SpCas9.VRER (PAM SEQ: NGCG), SaCas9WT (PAM SEQ: NNGRRT), SpRY (PAM SEQ: NRN or NYN), NmCas9WT (PAM SEQ: NNNNGATT), Cpfl (PAM SEQ: TTTV), or JeCas9WT (PAM SEQ: NNNVRYM). RNA molecules of the present invention are each designed to form complexes in conjunction with one or more different CRISPR nucleases and designed to target polynucleotide sequences of interest utilizing one or more different PAM sequences respective to the CRISPR nuclease utilized.

TABLE 1

Guide sequence portions designed to associate with specific SAMD9 gene targets

| Target | SEQ ID NOs: of 20-nucleotide guide sequence portions | SEQ ID NOs: of 21-nucleotide guide sequence portions | SEQ ID NOs: of 22-nucleotide guide sequence portions |
|---|---|---|---|
| 7:93101391_C_G | 1-52 | 53-106 | 107-162 |
| 7:93101435_G_A | 163-214 | 215-268 | 269-324 |
| 7:93101512_C_T | 325-376 | 377-430 | 431-486 |
| 7:93101540_C_A | 487-538 | 539-592 | 593-648 |
| 7:93101615_T_C | 649-700 | 701-754 | 755-810 |
| 7:93101761_AGTT_A | 811-852 | 853-896 | 897-942 |
| 7:93101900_G_A | 943-994 | 995-1048 | 1049-1104 |
| 7:93102220_C_T | 1105-1156 | 1157-1210 | 1211-1266 |
| 7:93102221_G_A | 1106-1107, 1109, 1113-1114, 1120, 1127, 1142, 1146, 1154, 1267-1308 | 1158, 1161, 1165, 1172, 1179, 1190, 1194, 1198-1199, 1208, 1309-1352 | 1212, 1219, 1226, 1244, 1248, 1252-1253, 1259, 1262-1263, 1353-1398 |
| 7:93102242_G_T | 1399-1444 | 1445-1486 | 1487-1536 |
| 7:93102259_G_A | 1537-1588 | 1589-1641 | 1642-1697 |
| 7:93102368_T_C | 1698-1749 | 1750-1803 | 1804-1859 |
| 7:93102514_G_A | 1860-1911 | 1912-1963 | 1964-2019 |
| 7:93102593_G_A | 2020-2071 | 2072-2125 | 2126-2181 |
| 7:93102692_C_G | 2182-2233 | 2234-2287 | 2288-2343 |
| 7:93102717_G_T | 2344-2385 | 2386-2421 | 2422-2463 |
| 7:93103150_AT_GA | 2464-2515 | 2516-2569 | 2570-2625 |
| 7:93103151_T_C | 2466, 2472, 2485-2486, 2496, 2499, 2503, 2508, 2513, 2515, 2626-2667 | 2518, 2524, 2532, 2539, 2543, 2553, 2557, 2562, 2567, 2569, 2668-2711 | 2572, 2576, 2579, 2581, 2587, 2594, 2598, 2613, 2623, 2625, 2712-2757 |
| 7:93103153_C_T | 2485-2486, 2503, 2508, 2513, 2515, 2640, 2665, 2758-2801 | 2524, 2532, 2539, 2557, 2562, 2569, 2673, 2689, 2802-2847 | 2572, 2576, 2579, 2587, 2594, 2625, 2736, 2752, 2848-2895 |
| 7:93103178_C_T | 2896-2947 | 2948-3001 | 3002-3057 |
| 7:93103253_C_A | 3058-3109 | 3110-3163 | 3164-3219 |
| 7:93103393_C_T | 3220-3271 | 3272-3324 | 3325-3379 |
| 7:93103588_C_CT | 3380-3427 | 3428-3477 | 3478-3529 |
| 7:93103598_T_A | 3530-3581 | 3582-3635 | 3636-3691 |
| 7:93103628_G_A | 3692-3743 | 3744-3787 | 3788-3835 |
| 7:93103679_C_T | 3836-3887 | 3888-3937 | 3938-3991 |
| 7:93103765_G_A | 3992-4043 | 4044-4097 | 4098-4153 |
| 7:93103772_G_T | 4154-4205 | 4206-4259 | 4260-4315 |
| 7:93103793_C_T | 4316-4367 | 4368-4421 | 4422-4477 |
| 7:93103851_G_T | 4478-4529 | 4530-4583 | 4584-4639 |
| 7:93103900_A_G | 4640-4691 | 4692-4745 | 4746-4801 |
| 7:93103916_T_C | 4802-4853 | 4854-4907 | 4908-4963 |
| 7:93103933_G_T | 4964-5015 | 5016-5069 | 5070-5125 |
| 7:93103938_GT_G | 5126-5169 | 5170-5215 | 5216-5263 |
| 7:93104044_C_T | 5264-5315 | 5316-5369 | 5370-5425 |
| 7:93104176_A_G | 5426-5477 | 5478-5531 | 5532-5587 |
| 7:93104296_ATT_A | 5588-5635 | 5636-5685 | 5686-5737 |
| 7:93104449_T_A | 5738-5789 | 5790-5843 | 5844-5899 |
| 7:93104694_TAC_GCA 7:93104695_AC_GA | 5900-5951 5900, 5906, 5910, 5921, 5924, 5926-5927, 5932, 5939, 5941, 6062-6103 | 5952-6005 5958, 5962, 5973, 5976, 5978, 5980, 5985, 5992, 5994, 6001, 6104-6147 | 6006-6061 6012, 6014, 6029, 6032, 6034, 6036, 6041, 6048, 6057, 6060, 6148-6193 |
| 7:93104722_C_T | 6194-6245 | 6246-6299 | 6300-6355 |
| 7:93105043_A_G | 6356-6407 | 6408-6459 | 6460-6515 |
| 7:93105103_A_G | 6516-6567 | 6568-6618 | 6619-6673 |
| 7:93105122_G_A | 6674-6707 | 6708-6712 | 6713-6723 |
| 7:93105295_A_G | 6724-6775 | 6776-6829 | 6830-6885 |
| 7:93105436_C_T | 6886-6937 | 6938-6991 | 6992-7047 |
| 7:93105485_T_G | 7048-7099 | 7100-7153 | 7154-7209 |
| 7:93105638_G_A | 7210-7261 | 7262-7311 | 7312-7364 |
| 7:93105781_C_T | 7365-7416 | 7417-7470 | 7471-7526 |
| 7:93105965_CT_C | 7527-7571 | 7572-7617 | 7618-7663 |
| 7:93106002_GT_G | 7664-7713 | 7714-7765 | 7766-7819 |
| 7:93106003_T_A | 7668, 7672, 7678, 7691-7692, 7697-7699, 7703, 7705, 7708, 7712, 7820-7859 | 7718, 7722, 7726, 7729, 7741, 7743-7744, 7749-7750, 7757, 7760, 7764, 7860-7901 | 7770, 7774, 7778-7779, 7782, 7794, 7796-7797, 7803, 7806, 7811, 7818, 7902-7945 |
| 7:93106096_A_G | 7946-7997 | 7998-8051 | 8052-8107 |
| 7:93096736_CT_C rs201891812_REF | 8108-8127 | 8128-8143 | 8144-8159 |
| 7:93096736_CT_C rs201891812_SNP | 8115, 8119, 8121, 8160 | 8134, 8137 | 8153, 8156, 8161 |
| 7:93096863_C_T rs73216083_REF | 8162-8213 | 8214-8265 | 8266-8321 |
| 7:93096863_C_T rs73216083_SNP | 8162-8164, 8166, 8168, 8171, 8178, 8180, 8183, 8198, 8200, 8203, 8322-8361 | 8214-8217, 8220, 8223, 8231, 8234, 8249-8250, 8362-8403 | 8266-8269, 8271, 8273, 8276, 8283-8284, 8303, 8305-8306, 8404-8447 |
| 7:93096894_C_CTTTT rs542330750_REF | 8448-8466 | 8467-8486 | 8487-8507 |
| 7:93097829_G_A rs7798225_REF | 8508-8559 | 8560-8613 | 8614-8669 |
| 7:93097829_G_A rs7798225_SNP | 8508, 8513, 8515, 8523, 8527-8528, 8531, 8533, 8546, 8556, 8558-8559, 8670-8709 | 8560, 8567, 8575, 8579-8581, 8584, 8586, 8599, 8603, 8612-8613, 8710-8751 | 8614, 8621, 8629, 8633-8635, 8638, 8640, 8657-8658, 8665, 8669, 8752-8795 |
| 7:93099114_C_T rs10953089_REF | 8796-8831 | 8832-8861 | 8862-8896 |
| 7:93099114_C_T rsl0953089_SNP | 8805, 8808, 8811-8812, 8818, 8822-8823, 8827-8831, 8897-8912 | 8841, 8844-8845, 8849, 8853-8854, 8858-8861, 8913-8922 | 8869, 8872, 8875-8877, 8881, 8885-8886, 8892, 8895-8896, 8923-8934 |
| 7:93099215_G_A rs10953090_REF | 8935-8986 | 8987-9040 | 9041-9096 |
| 7:93099215_G_A rs10953090_SNP | 8938, 8941, 8945-8946, 8953, 8959, 8962, 8968-8969, 8973, 8975, 8981, 9097-9134 | 8990, 8993, 8997-8998, 9005, 9014, 9020-9021, 9025-9026, 9034, 9037, 9135-9176 | 9044, 9047, 9051, 9059, 9073, 9075-9076, 9080-9081, 9089, 9092-9093, 9177-9220 |
| 7:93099485_T_C rs10277338_REF | 9221-9266 | 9267-9302 | 9303-9346 |
| 7:93099485_T_C rs10277338_SNP | 9223, 9230, 9233, 9235, 9238, 9246, 9249, 9254-9255, 9260, 9262, 9264, 9347-9386 | 9274, 9276-9277, 9280, 9285, 9287, 9292-9293, 9297, 9299-9300, 9302, 9387-9426 | 9310, 9314, 9317, 9319, 9323-9324, 9326, 9334-9335, 9341-9342, 9344, 9427-9470 |
| 7:93100095_T_C rs71562815_REF | 9471-9494 | 9495-9518 | 9519-9542 |
| 7:93100095_T_C rs71562815_SNP | 9474, 9476-9478, 9480-9482, 9486-9487, 9489, 9491, 9494, 9543-9582 | 9498, 9500-9501, 9504-9505, 9509-9512, 9514-9515, 9518, 9583-9624 | 9522, 9524, 9527-9529, 9532-9536, 9539, 9542, 9625-9668 |
| 7:93100248_G_T rs12333976_REF | 9669-9712 | 9713-9744 | 9745-9778 |
| 7:93100248_G_T rs12333976_SNP | 9673-9674, 9679, 9685, 9694, 9700, 9779-9800 | 9715, 9718, 9724, 9730, 9736, 9741, 9801-9818 | 9747, 9756, 9762, 9768, 9773, 9777, 9819-9840 |
| 7:93100656_GT_G rs3839837_REF | 9841-9862 | 9863-9883 | 9884-9905 |
| 7:93100656_GT_G rs3839837_SNP | 9850, 9856-9857, 9860, 9862, 9906 | 9871, 9873, 9881, 9883, 9907 | 9889, 9892, 9894-9895, 9905, 9908 |
| 7:93104453_C_A rs10279499_REF | 5744, 5746, 5765, 5772, 5776, 5780, 5786, 5789, 9909-9952 | 5791, 5796, 5798, 5815, 5818, 5825, 5840, 5843, 9953-9998 | 5845, 5852, 5854, 5869, 5872, 5880, 5891, 5899, 9999-10046 |
| 7:93104453_C_A rs10279499_SNP | 5744, 5765, 5772, 5780, 9911, 9926, 9929-9930, 9932, 9934, 9938, 9948, 10047-10086 | 5791, 5796, 5815, 5818, 9955, 9970, 9974, 9977, 9981, 9991, 9993-9994, 10087-10128 | 5845, 5854, 5869, 5891, 10001, 10004, 10017, 10024, 10028, 10038, 10040, 10046, 10129-10172 |
| 7:93104662_G_A rs78564070_REF | 10173-10224 | 10225-10278 | 10279-10334 |
| 7:93104662_G_A rs78564070_SNP | 10175, 10178, 10184, 10188, 10196, 10201, 10206, 10208, 10213-10214, 10217, 10222, 10335-10374 | 10230, 10236, 10240, 10242, 10249, 10254, 10261, 10265, 10267-10268, 10271, 10276, 10375-10416 | 10284, 10290, 10296, 10303, 10308, 10315, 10319, 10321-10322, 10327, 10331-10332, 10417-10460 |
| 7:93105138_A_G rs6965201_REF | 6678-6679, 6681, 6688, 6692, 6696, 10461-10506 | 6710, 10507-10547 | 6714, 6722, 10548-10592 |
| 7:93105138_A_G rs6965201_SNP | 10466-10467, 10473, 10477, 10485-10486, 10488, 10490-10491, 10497, 10500, 10506, 10593-10632 | 10511-10512, 10518, 10520, 10523,10531-10533, 10535, 10543, 10633-10674 | 10552-10554, 10561, 10573-10575, 10577, 10579, 10586, 10588, 10675-10718 |
| 7:93105670_A_G rs6969691 REF | 10719-10761 | 10762-10801 | 10802-10844 |
| 7:93105670_A_G rs6969691_SNP | 10721, 10726, 10735, 10742-10743, 10746, 10752, 10845-10884 | 10764, 10768, 10776, 10786, 10791, 10797, 10885-10922 | 10804, 10816, 10818, 10826, 10829, 10834, 10840, 10923-10964 |
| 7:93106641_A_G rs2374627 REF | 10965-11016 | 11017-11069 | 11070-11125 |
| 7:93106641_A_G rs2374627_SNP | 10971, 10978, 10981-10982, 10996-10997, 10999, 11001, 11005-11007, 11011, 11126-11165 | 11023, 11030, 11032, 11034-11035, 11049-11050, 11054, 11058, 11060, 11064, 11166-11207 | 11073, 11077, 11084,11086, 11088-11089, 11096, 11104-11105, 11109, 11115-11116, 11208-11251 |
| 7:93106866_A_C rs12668221_REF | 11252-11303 | 11304-11357 | 11358-11413 |
| 7:93106866_A_C rs12668221_SNP | 11259, 11269, 11272, 11275, 11277, 11279, 11288, 11291-11292, 11298-11299, 11303, 11414-11453 | 11311, 11323, 11325, 11328, 11332, 11341, 11344-11345, 11351-11352, 11356-11357, 11454-11495 | 11365, 11372, 11379, 11381, 11384, 11388, 11400-11401, 11407-11408, 11412-11413, 11496-11539 |
| 7:93107482_A_C rs28673511 REF | 11540-11567 | 11568-11591 | 11592-11620 |
| 7:93107482_A_C rs28673511_SNP | 11540-11541, 11544, 11547, 11553-11554, 11557, 11561, 11621-11648 | 11568-11570, 11572, 11574, 11577, 11579, 11582,11649-11670 | 11592-11596, 11598, 11605, 11607, 11610, 11671-11694 |
| 7:93107663_T_C rs10229795_REF | 11695-11745 | 11746-11787 | 11788-11833 |
| 7:93107663_T_C rs10229795_SNP | 11699, 11708, 11713, 11718, 11721, 11724, 11726, 11729, 11737-11738, 11744, 11834-11873 | 11753, 11761, 11763, 11765, 11769, 11772, 11778, 11780, 11874-11915 | 11796, 11804, 11806, 11808, 11811, 11813, 11822-11823, 11825, 11829, 11916-11959 |
| 7:93107775_C_T rs7785869_REF | 11960-12003 | 12004-12047 | 12048-12091 |
| 7:93107775_C_T rs7785869_SNP | 11969, 11977, 11979, 11988, 11992, 11995, 12092-12129 | 12020, 12022, 12031, 12035, 12038, 12042, 12130-12167 | 12063, 12065, 12068, 12079, 12082, 12086, 12168-12205 |
| 7:93108136_C_T rs67885698_REF | 12206-12257 | 12258-12311 | 12312-12367 |
| 7:93108136_C_T rs67885698_SNP | 12206-12208, 12211, 12218-12219, 12226, 12233, 12238, 12245, 12252, 12255, 12368-12407 | 12258-12260, 12263, 12270, 12272, 12277, 12280, 12292, 12299, 12306, 12309, 12408-12449 | 12312-12314, 12324, 12326, 12331, 12345, 12347, 12354, 12361-12362, 12365, 12450-12493 |
| 7:93108745_C_G rs6957832 REF | 12494-12543 | 12544-12597 | 12598-12653 |
| 7:93108925_C_T rs12704664_REF | 12654-12665 | 12666-12679 | 12680-12695 |
| 7:93108925_C_T rs12704664_SNP | 12659-12662, 12664-12665, 12696-12707 | 12672-12674, 12676, 12678-12679, 12708-12727 | 12683, 12689-12690, 12692, 12694-12695, 12728-12755 |
| 7:93100828-7:93101327 (3′ UTR downstream to the stop codon) | 12756-13657 | 13658-14559 | 14560-15461 |
| 7:93099521-7:93100020 (3′ UTR upstream to the polyadenylation signal) | 15462-16255 | 16256-17073 | 17074-17909 |
| 7:93099413-7:93099913 (Intergenic) | 9221-9230, 9232-9264, 15463, 15465-15466, 15469, 15471, 15473-15478, 15480-15482, 15484-15486, 15488-15491, 15494-15500, 15502-15503, 15505-15508, 15512-15514, 15516-15521, 15523-15527, 15529-15530, 15532-15537, 15539, 15545-15546, 15548-15556, 15558-15561, 15563-15565, 15567-15574, 15576-15577, 15580- | 9267-9302, 16257-16258, 16260-16261, 16264, 16266, 16268-16273, 16275-16278, 16280-16282, 16284-16288, 16292-16298, 16300-16301, 16303-16306, 16310-16312, 16314-16319, 16321-16325, 16327-16328, 16330-16336, 16338, 16344-16345, 16347-16355, 16357-16360, 16362-16364, 16366-16373, 16375-16376, 16379-16381, | 9303-9346, 17075-17076, 17078-17079, 17082, 17084, 17087-17092, 17094-17097, 17099-17101, 17103-17108, 17112-17118, 17120-17121, 17123-17126, 17130-17132, 17134-17139, 17141-17145, 17147-17148, 17150-17156, 17158, 17164-17165, 17167-17176, 17178-17181, 17183-17185, 17187-17194, 17196-17197, 17200-17202, |
| | 15582, 15584-15586, 15588, 15591-15592, 15594-15601, 15603-15609, 15611-15615, 15617-15618, 15620-15631, 15635-15637, 15639-15641, 15643-15646, 15648-15656, 15658-15659, 15661-15663, 15672-15674, 15677, 15679, 15681-15682, 15684-15689, 15691-15693, 15695-15697, 15699-15701, 15703-15704, 15707, 15709-15711, 15713-15714, 15717-15723, 15725-15726, 15728-15731, 15734-15738, 15741-15742, 15744-15746, 15748-15753, 15755, 15757-15763, 15765-15766, 15768-15769, 15771, 15773-15781, 15784-15794, 15796-15798, 15800-15804, 15807-15811, 15813, 15817-15822, 15824-15825, 15827-15831, 15833-15837, 15840-15842, 15844-15849, 15851-15857, 15859-15865, 15867, 15869, 15871-15874, 15876-15880, | 16383-16385, 16387, 16390-16391, 16393-16400, 16402-16408, 16410-16414, 16416-16417, 16419-16430, 16434-16436, 16438-16440, 16442-16445, 16447-16455, 16457-16459, 16461-16463, 16472-16474, 16477, 16479, 16481-16482, 16484-16489, 16491-16493, 16495-16498, 16501-16503, 16505-16506, 16509, 16511-16513, 16515-16517, 16520-16526, 16528-16529, 16531-16534, 16537-16541, 16544-16545, 16547-16549, 16551-16556, 16558, 16560-16566, 16568-16569,16571-16572, 16574, 16576-16585, 16588-16598, 16600-16602, 16604-16608, 16611-16616, 16618, 16622-16627, 16629-16630, 16632-16636, 16638-16642, 16645-16647, 16649-16655, 16657-16663, 16665-16671, 16673, 16676-16679, 16681-16685, 16687-16692, | 17204-17206, 17208-17209, 17212-17213, 17215-17222, 17224-17230, 17232-17236, 17238-17239, 17241-17252, 17256-17258, 17260-17262, 17264-17267, 17269-17277, 17279-17281, 17283-17285, 17294-17296, 17299, 17301, 17304-17305, 17307-17312, 17314-17316, 17318-17321, 17324-17326, 17328-17329, 17332, 17334-17336, 17339-17341, 17344-17352, 17354-17355, 17357-17360, 17363-17367, 17370-17371, 17373-17375, 17377-17382, 17384, 17386-17392, 17394-17396, 17398-17399, 17401, 17403-17412, 17415-17425,17427-17429, 17431-17435, 17438-17443, 17445, 17449-17454, 17456-17457, 17459-17463, 17465-17469, 17472-17474, 17476-17482, 17484-17490, 17492-17498, 17500, 17503-17506, 17508-17512, 17514- |
| | 15882-15887, 15889-15894, 15897-15900, 15902, 15904-15908, 15910-15914, 15916-15928, 15930-15935, 15939-15947, 15949-15951, 15953-15957, 15960-15966, 15968-15977, 15979-15983, 15986-15992, 15997-15998, 16000-16003, 16005-16009, 16011, 16014-16020, 16023-16031, 16035-16036, 16038, 16041, 16045-16048, 16054-16055, 16059,16061-16063, 16065-16073, 16075-16078, 16080-16082, 16085-16088, 16090-16091, 16093, 16095-16096, 16098-16100, 16102-16103, 16106, 16108-16111, 16113-16116, 16118-16122, 16124-16127, 16129-16136, 16138-16145,16147-16148, 16150-16154, 16157, 16159-16161, 16164-16170, 16172-16177, 16181, 16184-16187, 16189-16198, 16200-16201, 16203, 16206-16215, 16218-16230, | 16694-16699, 16702-16705, 16707, 16709-16713, 16715-16719, 16721-16733, 16735-16740, 16744-16752, 16754-16756, 16758-16762, 16765-16766, 16768-16771, 16773-16782, 16784-16788, 16791-16798, 16803-16804, 16806-16809, 16811-16815, 16817, 16820-16826, 16829-16837, 16839, 16842-16843, 16845, 16848, 16852-16855, 16861-16863, 16867, 16869-16871, 16873-16881, 16883-16886, 16888-16890, 16893-16897, 16899-16900, 16902, 16904-16905, 16907-16908, 16910-16911, 16913-16916, 16919, 16921-16924, 16926-16929, 16931-16939, 16941-16948, 16950-16957, 16959-16960, 16962-16966, 16969, 16971-16973, 16976-16982, 16984-16989, 16993-16994, 16997-17000, 17002-17011, 17013-17014, 17016, 17019, 17021- | 17519, 17521-17526, 17529-17532, 17534, 17536-17540, 17542-17546, 17548-17560, 17562-17567, 17571-17579, 17581-17583, 17585-17589, 17592-17593, 17595-17599, 17601-17610, 17612-17616, 17619-17626, 17631-17633, 17635-17638, 17640-17644, 17646, 17649-17655, 17658-17666, 17668, 17671-17672, 17674-17675, 17678, 17682-17685, 17691, 17693-17695, 17699, 17701-17703, 17705-17714,17716-17719,17721-17723, 17726-17730, 17732-17733, 17735, 17737-17738, 17740-17741, 17743-17745, 17747-17750, 17754-17757, 17759-17762, 17764-17772, 17774-17781, 17783-17784, 17786-17790, 17792-17793, 17795-17800, 17803, 17805-17807, 17810-17816, 17818-17823, 17827-17828, 17831-17834,17836-17846, 17848- |
| | 16232, 16234, 16236-16240, 16242-16247, 16249-16250, 16252, 16255, 17910-18038 | 17029, 17032-17044, 17046, 17048, 17050-17055, 17057-17064, 17066-17068, 17070, 17073,18039-18182 | 17850, 17852, 17855-17864, 17867-17879, 17881, 17883, 17885-17890, 17892-17899, 17901-17903, 17905, 17907, 17909,18183-18322 |
| 7:93106106-7:93106605 (Intron 2) | 18323-19086 | 19087-19860 | 19861-20640 |

[0204] The indicated locations listed in column 1 of the Table 1 are based on gnomAD v3.1 database and UCSC Genome Browser assembly ID: hg38, Sequencing/Assembly provider ID: Genome Reference Consortium Human GRCh38.p12 (GCA_000001405.27). Assembly date: December 2013 initial release; December 2017 patch release 12.

[0205] The SNP details are indicated by the listed SNP ID Nos. (“rs numbers”), which are based on the NCBI 2018 database of Single Nucleotide Polymorphisms (dbSNP)). The indicated DNA mutations are associated with Transcript Consequence NM_017654 as obtained from NCBI RefSeq genes.

[0206] Examples are provided below to facilitate a more complete understanding of the invention. The following examples illustrate the exemplary modes of making and practicing the invention. However, the scope of the invention is not limited to specific embodiments disclosed in these Examples, which are for purposes of illustration only.

### EXPERIMENTAL DETAILS

### Example 1: SAMD9 Correction Anaylsis

[0207] Guide sequences comprising 17-50 contiguous nucleotides containing nucleotides in the sequence set forth in any one of SEQ ID NOs: 1-20640 are screened for high on target activity using SpCas9 in HeLa cells. On target activity is determined by DNA capillary electrophoresis analysis.

### Example 2: Additional SAMD9 Editing Analysis

[0208] Germline gain of function mutations in sterile α motif domain-containing protein 9 (SAMD9) enhance its physiologic growth-inhibitory function and cause MIRAGE syndrome, which is characterized by growth restriction leading to bone marrow failure. To choose optimal RNA guide molecules for mutant allele elimination using a one-guide molecule strategy, which targets SNPs residing in the gene leading to protein truncation, or a two-guide molecule strategy deleting the full gene or 3′UTR of SAMD9, 14 different RNA guide molecules targeting nine (9) SNPs restricted to upstream of, downstream of, or within a coding region were screened for high on-target activity in HeLa and HSC cells (Table 2).

[0209] In HeLa cells, seven (7) different RNA guide moelcules targeting four (4) SNPs were screened by transfecting SpCas9 and a guide-expressing DNA molecule. Briefly, screening was performed in a 96-well format with an SpCas9 coding plasmid (64 ng) co-transfected with a DNA plasmid that expresses a RNA guide molecule (20 ng) using JetOPTIMUS® reagent (Polyplus). Cells were harvested 72 hours post DNA transfection. Cell lysis and genomic DNA extraction was performed in Quick extract (Lucigen) and endogenous genomic regions were amplified using specific primers to measure on-target activity by next-generation sequencing (NGS) (FIG. 1, Table 2).

[0210] Next, novel OMNI CRISPR nucleases with unique PAM requirements were tested for editing of upstream or coding region SNPs. These nucleases were tested in HeLa cells as described above. To this end, per each OMNI CRISPR nuclease, the corresponding OMNI-P2A-mCherry expression vector (pmOMNI, Table 4) was transfected into HeLa cells together with sgRNA designed to target specific location in the human genome (guide sequence portion, Table 2). At 72 hours cells were harvested, and half of the cells were used for quantification of transfection efficiency by FACS using mCherry fluorescence as marker. The rest of the cells were lysed, and their genomic DNA content was used in a PCR reaction which amplified the corresponding putative genomic targets. Amplicons were subjected to NGS and the resulting sequences were then used to calculate the percentage of editing events in each target site. Short insertions or deletions (indels) around the cut site are the typical outcome of repair of DNA ends following nuclease induced DNA cleavage. The calculation of % editing was therefore deduced from the fraction of indels containing sequences within each amplicon.

[0211] In addition, seven (7) additional, different RNA guide molecules targeting five (5) SNPs relevant to both excision and a one-guide strategy were screened in HSC cells. Briefly, 250 × 10³ HSC cells were mixed with preassembled RNPs composed of 105 pmole SpCas9 protein and 120 pmole of a sgRNA comprising a 20-nucleotide guide sequence portion, specified in Table 2, mixed with 100 pmole of electroporation enhancer (IDT-1075916) and electroporated using P3 primary cell 4D-nucleofector X Kit S (V4XP-3032, Lonza) by applying the DZ-100 program. A fraction of cells were harvested 72 hours post electroporation and genomic DNA was extracted to measure on-target activity by NGS. According to NGS analysis, all RNA guide molecules (FIG. 2, Table 2) depicted indel activity ranging from 10% -90%. Editing of g5 and g7 were allele specific (FIG. 3).

[0212] To test a one-guide molecule editing strategy of the mutant allele by targeting a SNP residing in the coding region of the gene (e.g. rs10279499, rs78564070 or rs6965201), which will lead to indels or frameshifts in the coding sequence and truncated protein, U2OS cells, homozygous to rs 10279499, rs78564070 and rs6965201 SNPs, were edited with an RNA guide molecule having one of four (4) different guide sequence portions. Briefly, 200 x 10³ U2OS cells were mixed with preassembled RNPs composed of 105 pmole SpCas9 protein and 120 pmole of a sgRNA comprising a 20-nucleotide guide sequence portion, specified in Table 2, mixed with 100 pmole of electroporation enhancer (IDT-1075916) and electroporated using SE primary cell 4D-nucleofector X Kit S (V4XC-1032, Lonza) by applying the DN-100 program. A fraction of cells were harvested 72 hours post electroporation, genomic DNA was extracted, and an on-target editing activity of 45-96% was measured by NGS. Cells were grown for an additional three (3) days and harvested for protein degradation. SAMD9 protein levels were detected with anti-SAMD9 antibody (ab180575, Abcam) and anti-GAPDH (60004-1-lg, Protein-tech) was used for normalization (FIGS. 3A, B). All guide sequence portions which depicted high editing efficiency resulted in significant decrease in SAMD9 levels (FIGS. 4A-4B) and can be used for a one-guide molecule strategy.

TABLE 2

20-nucleotide or 22-nucleotide long guide sequence portion sequences targeting SNPs located in SAMD9 region

| | | | | |
|---|---|---|---|---|
| Genomic region | SNP | Guide Sequence Portion (gRNA) Name | Guide Sequence Portion Sequence | PAM region |
| Coding region | rs10279499 | g1 | AUCUCUUGGGUCAUCCACAG (SEQ ID NO: 9913) | AGG |
| | | g2 | AUUUCUAUUACUGUCCUCUG (SEQ ID NO: 5746) | UGG |
| | | g30 | AUCUCUUGGGUCAUCCACAGAG (SEQ ID NO: 10003) | GACAGTAA |
| Coding region | rs78564070 | g3 | AGAGUAGAAAUCGUCUCAUU (SEQ ID NO: 10191) | UGG |
| | | g4 | AGAAAUCGUCUCAUUUGGUG (SEQ ID NO: 10189) | UGG |
| Coding region | rs6965201 | g5 | UAAUCUGGAAAUAAUCAUAU (SEQ ID NO: 10487) | UGG |
| Upstream | rs6957832 | g7 | GCAAGGCGGCAGCAAGCCUG (SEQ ID NO: 12525) | GGG |
| Upstream | rs12668221 | g9 | CAGAGUUGAGGUCUGUUUAA (SEQ ID NO: 11266) | AGG |
| | | g31 | GCCAAGACCCUUUAAACAGACC (SEQ ID NO: 11391) | TCAACTCT |
| Downstream | rs10953090 | g23_alt | AGAAGCAGAAAGUUGAAUGG (SEQ ID NO: 9108) | UGG |
| | | g24_alt | CAUAGAAGCAGAAAGUUGAA (SEQ ID NO: 9114) | UGG |
| Upstream | rs12668221 | g25 | AGAGUUGAGGUCUGUUUAAA (SEQ ID NO: 11261) | GGG |
| | | g26 | GAGGUCUGUUUAAAGGGUCU (SEQ ID NO: 11280) | UGG |
| Upstream | rs12704664 | g27 | CCCUGUCUGACAGCUUUGAA (SEQ ID NO: 12657) | AGG |
| Upstream | rs67885698 | g28 | UGGCGAGGCACGGCAAGGCA (SEQ ID NO: 12255) | CGG |
| | | g29 | GAGGCACGGCAAGGCACGGC (SEQ ID NO: 12233) | GGG |
| Upstream | rs10229795 | g32 | CUGAGUUUGUAUCUGCCACUAG (SEQ ID NO: 11808) | AAAACAAT |

TABLE 3

Novel nucleases sgRNA scaffold sequences, with each OMNI CRISPR nuclease also indicated with its PAM requirement

| | | |
|---|---|---|
| OMNI CRISPR Nuclease | PAM Sequence | sgRNA Scaffold Sequence |
| OMNI-103 (SEQ ID NO:20646) with g31 | NNRACT | GccaagacccUUUaaacagaccGUUUGAGAGUAGUGUAAgaaaUUACACUACAAGUUCAAAUAAAAAUUUAUUCAAAUCCAUUUGCUACAUUGUGUAGAAUUUAAAGAUCUGGCAACAGAUCUUUUUUU (SEQ ID NO: 20649) |
| OMNI-120 (SEQ ID NO: 20647 with g32 | NRRAC | CUgagUUUgUaUcUgccacUagGUUUGAGAGCCUUGUUAgaaaUAACAAGGCGAGUGCAAAUAAGGUUUAACCGAAUUCACCGUUUAUGGACCGCAUUGUGCGGAUUUUUU (SEQ ID NO: 20650) |
| OMNI-138 (SEQ ID NO: 20648) with g30 | NNNNGBNH | AUCUCUUGGGUCAUCCACAGAGGUUGUAGUUCCCUAAUUAUgaaaACAAUUAGGUUACUAUGAUAAGGUAGUAUACCGCAAAGCUCUAACGCCUCAUCUUAAUGAUGGGGCGUUAUCUUUUUU (SEQ ID NO: 20651) |

TABLE 4

OMNI CRISPR nuclease mammalian expression plasmid and elements

| | | |
|---|---|---|
| Plasmid Name | Purpose | Elements |
| pmOMNI | Expressing OMNI polypeptide in the mammalian system | CMV promoter - Kozak - SV40 NLS - OMNI ORF (human optimized) - HA - SV40 NLS - P2A - mCherry - bGH poly(A) signal |

TABLE 4

Annex

| | | |
|---|---|---|
| Element | SEQ ID NO of Amino Acid Sequence | SEQ ID NO of DNA sequence |
| HA Tag | SEQ ID NO: 20652 | SEQ ID NO: 20656 |
| NLS | SEQ ID NO: 20653 | SEQ ID NO: 20657 |
| P2A | SEQ ID NO: 20654 | SEQ ID NO: 20658 |
| mCherry | SEQ ID NO: 20655 | SEQ ID NO: 20659 |

### REFERENCES

[0213] 1. Ahmad and Allen (1992) “Antibody-mediated Specific Binging and Cytotoxicity of Lipsome-entrapped Doxorubicin to Lung Cancer Cells in Vitro”, Cancer Research 52:4817-20.

[0214] 2. Anderson (1992) “Human gene therapy”, Science 256:808-13.

[0215] 3. Basha et al. (2011) “Influence of Cationic Lipid Composition on Gene Silencing Properties of Lipid Nanoparticle Formulations of siRNA in Antigen-Presenting Cells”, Mol. Ther. 19(12):2186-200.

[0216] 4. Behr (1994) Gene transfer with synthetic cationic amphiphiles: Prospects for gene therapy”, Bioconjuage Chem 5:382-89.

[0217] 5. Blaese (1995) “Vectors in cancer therapy: how will they deliver”, Cancer Gene Ther. 2:291-97.

[0218] 6. Blaese et al. (1995) “T lympocyte-directed gene therapy for ADA-SCID: initial trial results after 4 years”, Science 270(5235):475-80.

[0219] 7. Buchschacher and Panganiban (1992) “Human immunodeficiency virus vectors for inducible expression of foreign genes”, J. Virol. 66:2731-39.

[0220] 8. Burstein et al. (2017) “New CRISPR-Cas systems from uncultivated microbes”, Nature 542:237-41.

[0221] 9. Chang and Wilson (1987) “Modification of DNA ends can decrease end-j oining relative to homologous recombination in mammalian cells”, Proc. Natl. Acad. Sci. USA 84:4959-4963.

[0222] 10. Chung et al. (2006) “Agrobacterium is not alone: gene transfer to plants by viruses and other bacteria”, Trends Plant Sci. 11(1):1-4.

[0223] 11. Coelho et al. (2013) “Safety and efficacy of RNAi therapy for transthyretin amyloidosis” N. Engl. J. Med. 369, 819-829.

[0224] 12. Collias and Beisel (2021) “CRISPR technologies and the search for the PAM-free nuclease”, Nature Communications 12, 555.

[0225] 13. Crystal (1995) “Transfer of genes to humans: early lessons and obstacles to success”, Science 270(5235):404-10.

[0226] 14. Davidsson et al. (2018) “SAMD9 and SAMD9L in inherited predispositon to ataxia, pancytopenia, and myeloid malignancies”, Leukemia 32:1106-1115.

[0227] 15. Dillon (1993) “Regulation gene expression in gene therapy” Trends in Biotechnology 11(5):167-173.

[0228] 16. Dranoff et al. (1997) “A phase I study of vaccination with autologous, irradiated melanoma cells engineered to secrete human granulocyte macrophage colony stimulating factor”, Hum. Gene Ther. 8(1): 111-23.

[0229] 17. Dunbar et al. (1995) “Retrovirally marked CD34-enriched peripheral blood and bone marrow cells contribute to long-term engraftment after autologous transplantation”, Blood 85:3048-57.

[0230] 18. Ellem et al. (1997) “A case report: immune responses and clinical course of the first human use of ganulocyte/macrophage-colony-stimulating-factor-tranduced autologous melanoma cells for immunotherapy”, Cancer Immunol Immunother 44:10-20.

[0231] 19. Gao and Huang (1995) “Cationic liposome-mediated gene transfer” Gene Ther. 2(10):710-22.

[0232] 20. Haddada et al. (1995) “Gene Therapy Using Adenovirus Vectors”, in: The Molecular Repertoire of Adenoviruses III: Biology and Pathogenesis, ed. Doerfler and Böhm, pp. 297-306.

[0233] 21. Han et al. (1995) “Ligand-directed retro-viral targeting of human breast cancer cells”, Proc Natl Acad Sci U.S.A. 92(21):9747-51.

[0234] 22. Hu et al. (2018) “Evolved Cas9 variants with broad PAM compatibility and high DNA specificity”, Nature 556(7699):57-63.

[0235] 23. Inaba et al. (1992) “Generation of large numbers of dendritic cells from mouse bone marrow cultures supplemented with granulocyte/macrophage colony-stimulating factor”, J Exp Med. 176(6):1693-702.

[0236] 24. Jinek et al. (2012) “A programmable dual-RNA-guided DNA endonuclease in adaptive bacterial immunity,” Science 337(6096):816-21.

[0237] 25. Johan et al. (1992) “GLVR1, a receptor for gibbon ape leukemia virus, is homologous to a phosphate permease of Neurospora crassa and is expressed at high levels in the brain and thymus”, J Virol 66(3):1635-40.

[0238] 26. Judge et al. (2006) “Design of noninflammatory synthetic siRNA mediating potent gene silencing in vivo”, Mol Ther. 13(3):494-505.

[0239] 27. Kohn et al. (1995) “Engraftment of gene-modified umbilical cord blood cells in neonates with adnosine deaminase deficiency”, Nature Medicine 1:1017-23.

[0240] 28. Kremer and Perricaudet (1995) “Adenovirus and adeno-associated virus mediated gene transfer”, Br. Med. Bull. 51(1):31-44.

[0241] 29. Macdiarmid et al. (2009) “Sequential treatment of drug-resistant tumors with targeted minicells containing siRNA or a cytotoxic drug”, Nat Biotehcnol. 27(7):643-51.

[0242] 30. Malech et al. (1997) “Prolonged production of NADPH oxidase-corrected granulocyes after gene therapy of chronic granulomatous disease”, PNAS 94(22):12133-38.

[0243] 31. Miller et al. (1991) “Construction and properties of retrovirus packaging cells based on gibbon ape leukemia virus”, J Virol. 65(5):2220-24.

[0244] 32. Miller (1992) “Human gene therapy comes of age”, Nature 357:455-60.

[0245] 33. Mitani and Caskey (1993) “Delivering therapeutic genes - matching approach and application”, Trends in Biotechnology 11(5): 162-66.

[0246] 34. Nabel and Felgner (1993) “Direct gene transfer for immunotherapy and immunization”, Trends in Biotechnology 11(5):211-15.

[0247] 35. Nishimasu et al. (2018) “Engineered CRISPR-Cas9 nuclease with expanded targeting space”, Science 361(6408):1259-1262.

[0248] 36. Narumi et al. (2016) “SAMD9 mutations cause a novel multisystem disorder, MIRAGE syndrome, and are associated with loss of chromosome 7”, Nature Genetics 48:792-797.

[0249] 37. Remy et al. (1994) “Gene Transfer with a Series of Lipphilic DNA-Binding Molecules”, Bioconjugate Chem. 5(6):647-54.

[0250] 38. Sentmanat et al. (2018) “A Survey of Validation Strategies for CRISPR-Cas9 Editing”, Scientific Reports 8:888, doi:10.1038/s41598-018-19441-8.

[0251] 39. Sommerfelt et al. (1990) “Localization of the receptor gene for type D simian retroviruses on human chromosome 19”, J. Virol. 64(12):6214-20.

[0252] 40. Van Brunt (1988) “Molecular framing: transgenic animals as bioactors” Biotechnology 6:1149-54.

[0253] 41. Vigne et al. (1995) “Third-generation adenovectors for gene therapy”, Restorative Neurology and Neuroscience 8(1,2): 35-36.

[0254] 42. Walton et al. (2020) “Unconstrained genome targeting with near-PAMless engineered CRISPR-Cas9 variants”, Science 368(6488):290-296.

[0255] 43. Weissman and Kariko (2015) “mRNA:Fulfilling the promise of gene therapy”, Molecular Therapy (9):1416-7.

[0256] 44. Wilson et al. (1989) “Formation of infectious hybrid virion with gibbon ape leukemia virus and human T-cell leukemia virus retroviral envelope glycoproteins and the gag and pol proteins of Moloney murine leukemia virus”, J. Virol. 63:2374-78.

[0257] 45. Yu et al. (1994) “Progress towards gene therapy for HIV infection”, Gene Ther. 1(1):13-26.

[0258] 46. Zetsche et al. (2015) “Cpf1 is a single RNA-guided endonuclease of a class 2 CRIPSR-Cas system” Cell 163(3):759-71.

[0259] 47. Zuris et al. (2015) “Cationic lipid-mediated delivery of proteins enables efficient protein based genome editing in vitro and in vivo” Nat Biotechnol. 33(1):73-80.

The application's sequence listing, which the Patent Office published only in electronic form, follows.

SEQUENCE LISTING (20659 sequences)

SEQ ID NO: 1 - RNA, 20 nt, Artificial Sequence
  SAMD9 targeting guide sequence portion
aaaaagacacguucucuaug

SEQ ID NO: 2 - RNA, 20 nt, Artificial Sequence
  SAMD9 targeting guide sequence portion
aaaagacacguucucuaugc

SEQ ID NO: 3 - RNA, 20 nt, Artificial Sequence
  SAMD9 targeting guide sequence portion
aaaaucccagguaaaaagac

SEQ ID NO: 4 - RNA, 20 nt, Artificial Sequence
  SAMD9 targeting guide sequence portion
aaagacacguucucuaugcu

SEQ ID NO: 5 - RNA, 20 nt, Artificial Sequence
  SAMD9 targeting guide sequence portion
aaaucccagguaaaaagaca

SEQ ID NO: 6 - RNA, 20 nt, Artificial Sequence
  SAMD9 targeting guide sequence portion
aacgugucuuuuuaccuggg

SEQ ID NO: 7 - RNA, 20 nt, Artificial Sequence
  SAMD9 targeting guide sequence portion
aagacacguucucuaugcuu

SEQ ID NO: 8 - RNA, 20 nt, Artificial Sequence
  SAMD9 targeting guide sequence portion
aagcauagagaacgugucuu

SEQ ID NO: 9 - RNA, 20 nt, Artificial Sequence
  SAMD9 targeting guide sequence portion
aaguggcagaagcauagaga

SEQ ID NO: 10 - RNA, 20 nt, Artificial Sequence
  SAMD9 targeting guide sequence portion
aaucccagguaaaaagacac

SEQ ID NO: 11 - RNA, 20 nt, Artificial Sequence
  SAMD9 targeting guide sequence portion
acacguucucuaugcuucug

SEQ ID NO: 12 - RNA, 20 nt, Artificial Sequence
  SAMD9 targeting guide sequence portion
acgugucuuuuuaccuggga

SEQ ID NO: 13 - RNA, 20 nt, Artificial Sequence
  SAMD9 targeting guide sequence portion
acguucucuaugcuucugcc

SEQ ID NO: 14 - RNA, 20 nt, Artificial Sequence
  SAMD9 targeting guide sequence portion
agaacgugucuuuuuaccug

SEQ ID NO: 15 - RNA, 20 nt, Artificial Sequence
  SAMD9 targeting guide sequence portion
agaagcauagagaacguguc

SEQ ID NO: 16 - RNA, 20 nt, Artificial Sequence
  SAMD9 targeting guide sequence portion
agaaguggcagaagcauaga

SEQ ID NO: 17 - RNA, 20 nt, Artificial Sequence
  SAMD9 targeting guide sequence portion
agacacguucucuaugcuuc

SEQ ID NO: 18 - RNA, 20 nt, Artificial Sequence
  SAMD9 targeting guide sequence portion
agagaacgugucuuuuuacc

SEQ ID NO: 19 - RNA, 20 nt, Artificial Sequence
  SAMD9 targeting guide sequence portion
agcauagagaacgugucuuu

SEQ ID NO: 20 - RNA, 20 nt, Artificial Sequence
  SAMD9 targeting guide sequence portion
agguaaaaagacacguucuc

SEQ ID NO: 21 - RNA, 20 nt, Artificial Sequence
  SAMD9 targeting guide sequence portion
aguggcagaagcauagagaa

SEQ ID NO: 22 - RNA, 20 nt, Artificial Sequence
  SAMD9 targeting guide sequence portion
auagagaacgugucuuuuua

SEQ ID NO: 23 - RNA, 20 nt, Artificial Sequence
  SAMD9 targeting guide sequence portion
aucccagguaaaaagacacg

SEQ ID NO: 24 - RNA, 20 nt, Artificial Sequence
  SAMD9 targeting guide sequence portion
cacguucucuaugcuucugc

SEQ ID NO: 25 - RNA, 20 nt, Artificial Sequence
  SAMD9 targeting guide sequence portion
cagaagcauagagaacgugu

SEQ ID NO: 26 - RNA, 20 nt, Artificial Sequence
  SAMD9 targeting guide sequence portion
cagguaaaaagacacguucu

SEQ ID NO: 27 - RNA, 20 nt, Artificial Sequence
  SAMD9 targeting guide sequence portion
cauagagaacgugucuuuuu

SEQ ID NO: 28 - RNA, 20 nt, Artificial Sequence
  SAMD9 targeting guide sequence portion
ccagguaaaaagacacguuc

SEQ ID NO: 29 - RNA, 20 nt, Artificial Sequence
  SAMD9 targeting guide sequence portion
cccagguaaaaagacacguu

SEQ ID NO: 30 - RNA, 20 nt, Artificial Sequence
  SAMD9 targeting guide sequence portion
cgugucuuuuuaccugggau

SEQ ID NO: 31 - RNA, 20 nt, Artificial Sequence
  SAMD9 targeting guide sequence portion
cguucucuaugcuucugcca

SEQ ID NO: 32 - RNA, 20 nt, Artificial Sequence
  SAMD9 targeting guide sequence portion
gaaaaucccagguaaaaaga

SEQ ID NO: 33 - RNA, 20 nt, Artificial Sequence
  SAMD9 targeting guide sequence portion
gaacgugucuuuuuaccugg

SEQ ID NO: 34 - RNA, 20 nt, Artificial Sequence
  SAMD9 targeting guide sequence portion
gaagcauagagaacgugucu

SEQ ID NO: 35 - RNA, 20 nt, Artificial Sequence
  SAMD9 targeting guide sequence portion
gaaguggcagaagcauagag

SEQ ID NO: 36 - RNA, 20 nt, Artificial Sequence
  SAMD9 targeting guide sequence portion
gacacguucucuaugcuucu

SEQ ID NO: 37 - RNA, 20 nt, Artificial Sequence
  SAMD9 targeting guide sequence portion
gagaacgugucuuuuuaccu

SEQ ID NO: 38 - RNA, 20 nt, Artificial Sequence
  SAMD9 targeting guide sequence portion
gcagaagcauagagaacgug

SEQ ID NO: 39 - RNA, 20 nt, Artificial Sequence
  SAMD9 targeting guide sequence portion
gcauagagaacgugucuuuu

SEQ ID NO: 40 - RNA, 20 nt, Artificial Sequence
  SAMD9 targeting guide sequence portion
ggaaaaucccagguaaaaag

SEQ ID NO: 41 - RNA, 20 nt, Artificial Sequence
  SAMD9 targeting guide sequence portion
ggcagaagcauagagaacgu

SEQ ID NO: 42 - RNA, 20 nt, Artificial Sequence
  SAMD9 targeting guide sequence portion
gguaaaaagacacguucucu

SEQ ID NO: 43 - RNA, 20 nt, Artificial Sequence
  SAMD9 targeting guide sequence portion
guaaaaagacacguucucua

SEQ ID NO: 44 - RNA, 20 nt, Artificial Sequence
  SAMD9 targeting guide sequence portion
guggcagaagcauagagaac

SEQ ID NO: 45 - RNA, 20 nt, Artificial Sequence
  SAMD9 targeting guide sequence portion
guucucuaugcuucugccac

SEQ ID NO: 46 - RNA, 20 nt, Artificial Sequence
  SAMD9 targeting guide sequence portion
uaaaaagacacguucucuau

SEQ ID NO: 47 - RNA, 20 nt, Artificial Sequence
  SAMD9 targeting guide sequence portion
uagaaguggcagaagcauag

SEQ ID NO: 48 - RNA, 20 nt, Artificial Sequence
  SAMD9 targeting guide sequence portion
uagagaacgugucuuuuuac

SEQ ID NO: 49 - RNA, 20 nt, Artificial Sequence
  SAMD9 targeting guide sequence portion
ucccagguaaaaagacacgu

SEQ ID NO: 50 - RNA, 20 nt, Artificial Sequence
  SAMD9 targeting guide sequence portion
uggaaaaucccagguaaaaa

SEQ ID NO: 51 - RNA, 20 nt, Artificial Sequence
  SAMD9 targeting guide sequence portion
uggcagaagcauagagaacg

SEQ ID NO: 52 - RNA, 20 nt, Artificial Sequence
  SAMD9 targeting guide sequence portion
uuagaaguggcagaagcaua

SEQ ID NO: 53 - RNA, 21 nt, Artificial Sequence
  SAMD9 targeting guide sequence portion
aaaaagacacguucucuaugc

SEQ ID NO: 54 - RNA, 21 nt, Artificial Sequence
  SAMD9 targeting guide sequence portion
aaaagacacguucucuaugcu

SEQ ID NO: 55 - RNA, 21 nt, Artificial Sequence
  SAMD9 targeting guide sequence portion
aaaaucccagguaaaaagaca

SEQ ID NO: 56 - RNA, 21 nt, Artificial Sequence
  SAMD9 targeting guide sequence portion
aaagacacguucucuaugcuu

SEQ ID NO: 57 - RNA, 21 nt, Artificial Sequence
  SAMD9 targeting guide sequence portion
aaaucccagguaaaaagacac

SEQ ID NO: 58 - RNA, 21 nt, Artificial Sequence
  SAMD9 targeting guide sequence portion
aacgugucuuuuuaccuggga

SEQ ID NO: 59 - RNA, 21 nt, Artificial Sequence
  SAMD9 targeting guide sequence portion
aagacacguucucuaugcuuc

SEQ ID NO: 60 - RNA, 21 nt, Artificial Sequence
  SAMD9 targeting guide sequence portion
aagcauagagaacgugucuuu

SEQ ID NO: 61 - RNA, 21 nt, Artificial Sequence
  SAMD9 targeting guide sequence portion
aaguggcagaagcauagagaa

SEQ ID NO: 62 - RNA, 21 nt, Artificial Sequence
  SAMD9 targeting guide sequence portion
aaucccagguaaaaagacacg

SEQ ID NO: 63 - RNA, 21 nt, Artificial Sequence
  SAMD9 targeting guide sequence portion
acacguucucuaugcuucugc

SEQ ID NO: 64 - RNA, 21 nt, Artificial Sequence
  SAMD9 targeting guide sequence portion
acgugucuuuuuaccugggau

SEQ ID NO: 65 - RNA, 21 nt, Artificial Sequence
  SAMD9 targeting guide sequence portion
acguucucuaugcuucugcca

SEQ ID NO: 66 - RNA, 21 nt, Artificial Sequence
  SAMD9 targeting guide sequence portion
agaacgugucuuuuuaccugg

SEQ ID NO: 67 - RNA, 21 nt, Artificial Sequence
  SAMD9 targeting guide sequence portion
agaagcauagagaacgugucu

SEQ ID NO: 68 - RNA, 21 nt, Artificial Sequence
  SAMD9 targeting guide sequence portion
agaaguggcagaagcauagag

SEQ ID NO: 69 - RNA, 21 nt, Artificial Sequence
  SAMD9 targeting guide sequence portion
agacacguucucuaugcuucu

SEQ ID NO: 70 - RNA, 21 nt, Artificial Sequence
  SAMD9 targeting guide sequence portion
agagaacgugucuuuuuaccu

SEQ ID NO: 71 - RNA, 21 nt, Artificial Sequence
  SAMD9 targeting guide sequence portion
agcauagagaacgugucuuuu

SEQ ID NO: 72 - RNA, 21 nt, Artificial Sequence
  SAMD9 targeting guide sequence portion
agguaaaaagacacguucucu

SEQ ID NO: 73 - RNA, 21 nt, Artificial Sequence
  SAMD9 targeting guide sequence portion
aguggcagaagcauagagaac

SEQ ID NO: 74 - RNA, 21 nt, Artificial Sequence
  SAMD9 targeting guide sequence portion
auagagaacgugucuuuuuac

SEQ ID NO: 75 - RNA, 21 nt, Artificial Sequence
  SAMD9 targeting guide sequence portion
aucccagguaaaaagacacgu

SEQ ID NO: 76 - RNA, 21 nt, Artificial Sequence
  SAMD9 targeting guide sequence portion
auggaaaaucccagguaaaaa

SEQ ID NO: 77 - RNA, 21 nt, Artificial Sequence
  SAMD9 targeting guide sequence portion
cacguucucuaugcuucugcc

SEQ ID NO: 78 - RNA, 21 nt, Artificial Sequence
  SAMD9 targeting guide sequence portion
cagaagcauagagaacguguc

SEQ ID NO: 79 - RNA, 21 nt, Artificial Sequence
  SAMD9 targeting guide sequence portion
cagguaaaaagacacguucuc

SEQ ID NO: 80 - RNA, 21 nt, Artificial Sequence
  SAMD9 targeting guide sequence portion
cauagagaacgugucuuuuua

SEQ ID NO: 81 - RNA, 21 nt, Artificial Sequence
  SAMD9 targeting guide sequence portion
ccagguaaaaagacacguucu

SEQ ID NO: 82 - RNA, 21 nt, Artificial Sequence
  SAMD9 targeting guide sequence portion
cccagguaaaaagacacguuc

SEQ ID NO: 83 - RNA, 21 nt, Artificial Sequence
  SAMD9 targeting guide sequence portion
cgugucuuuuuaccugggauu

SEQ ID NO: 84 - RNA, 21 nt, Artificial Sequence
  SAMD9 targeting guide sequence portion
cguucucuaugcuucugccac

SEQ ID NO: 85 - RNA, 21 nt, Artificial Sequence
  SAMD9 targeting guide sequence portion
cuuagaaguggcagaagcaua

SEQ ID NO: 86 - RNA, 21 nt, Artificial Sequence
  SAMD9 targeting guide sequence portion
gaaaaucccagguaaaaagac

SEQ ID NO: 87 - RNA, 21 nt, Artificial Sequence
  SAMD9 targeting guide sequence portion
gaacgugucuuuuuaccuggg

SEQ ID NO: 88 - RNA, 21 nt, Artificial Sequence
  SAMD9 targeting guide sequence portion
gaagcauagagaacgugucuu

SEQ ID NO: 89 - RNA, 21 nt, Artificial Sequence
  SAMD9 targeting guide sequence portion
gaaguggcagaagcauagaga

SEQ ID NO: 90 - RNA, 21 nt, Artificial Sequence
  SAMD9 targeting guide sequence portion
gacacguucucuaugcuucug

SEQ ID NO: 91 - RNA, 21 nt, Artificial Sequence
  SAMD9 targeting guide sequence portion
gagaacgugucuuuuuaccug

SEQ ID NO: 92 - RNA, 21 nt, Artificial Sequence
  SAMD9 targeting guide sequence portion
gcagaagcauagagaacgugu

SEQ ID NO: 93 - RNA, 21 nt, Artificial Sequence
  SAMD9 targeting guide sequence portion
gcauagagaacgugucuuuuu

SEQ ID NO: 94 - RNA, 21 nt, Artificial Sequence
  SAMD9 targeting guide sequence portion
ggaaaaucccagguaaaaaga

SEQ ID NO: 95 - RNA, 21 nt, Artificial Sequence
  SAMD9 targeting guide sequence portion
ggcagaagcauagagaacgug

SEQ ID NO: 96 - RNA, 21 nt, Artificial Sequence
  SAMD9 targeting guide sequence portion
gguaaaaagacacguucucua

SEQ ID NO: 97 - RNA, 21 nt, Artificial Sequence
  SAMD9 targeting guide sequence portion
guaaaaagacacguucucuau

SEQ ID NO: 98 - RNA, 21 nt, Artificial Sequence
  SAMD9 targeting guide sequence portion
guggcagaagcauagagaacg

SEQ ID NO: 99 - RNA, 21 nt, Artificial Sequence
  SAMD9 targeting guide sequence portion
guucucuaugcuucugccacu

SEQ ID NO: 100 - RNA, 21 nt, Artificial Sequence
  SAMD9 targeting guide sequence portion
uaaaaagacacguucucuaug

SEQ ID NO: 101 - RNA, 21 nt, Artificial Sequence
  SAMD9 targeting guide sequence portion
uagaaguggcagaagcauaga

SEQ ID NO: 102 - RNA, 21 nt, Artificial Sequence
  SAMD9 targeting guide sequence portion
uagagaacgugucuuuuuacc

SEQ ID NO: 103 - RNA, 21 nt, Artificial Sequence
  SAMD9 targeting guide sequence portion
ucccagguaaaaagacacguu

SEQ ID NO: 104 - RNA, 21 nt, Artificial Sequence
  SAMD9 targeting guide sequence portion
uggaaaaucccagguaaaaag

SEQ ID NO: 105 - RNA, 21 nt, Artificial Sequence
  SAMD9 targeting guide sequence portion
uggcagaagcauagagaacgu

SEQ ID NO: 106 - RNA, 21 nt, Artificial Sequence
  SAMD9 targeting guide sequence portion
uuagaaguggcagaagcauag

SEQ ID NO: 107 - RNA, 22 nt, Artificial Sequence
  SAMD9 targeting guide sequence portion
aaaaagacacguucucuaugcu

SEQ ID NO: 108 - RNA, 22 nt, Artificial Sequence
  SAMD9 targeting guide sequence portion
aaaagacacguucucuaugcuu

SEQ ID NO: 109 - RNA, 22 nt, Artificial Sequence
  SAMD9 targeting guide sequence portion
aaaaucccagguaaaaagacac

SEQ ID NO: 110 - RNA, 22 nt, Artificial Sequence
  SAMD9 targeting guide sequence portion
aaagacacguucucuaugcuuc

SEQ ID NO: 111 - RNA, 22 nt, Artificial Sequence
  SAMD9 targeting guide sequence portion
aaaucccagguaaaaagacacg

SEQ ID NO: 112 - RNA, 22 nt, Artificial Sequence
  SAMD9 targeting guide sequence portion
aacgugucuuuuuaccugggau

SEQ ID NO: 113 - RNA, 22 nt, Artificial Sequence
  SAMD9 targeting guide sequence portion
aagacacguucucuaugcuucu

SEQ ID NO: 114 - RNA, 22 nt, Artificial Sequence
  SAMD9 targeting guide sequence portion
aagcauagagaacgugucuuuu

SEQ ID NO: 115 - RNA, 22 nt, Artificial Sequence
  SAMD9 targeting guide sequence portion
aaguggcagaagcauagagaac

SEQ ID NO: 116 - RNA, 22 nt, Artificial Sequence
  SAMD9 targeting guide sequence portion
aaucccagguaaaaagacacgu

SEQ ID NO: 117 - RNA, 22 nt, Artificial Sequence
  SAMD9 targeting guide sequence portion
aauggaaaaucccagguaaaaa

SEQ ID NO: 118 - RNA, 22 nt, Artificial Sequence
  SAMD9 targeting guide sequence portion
acacguucucuaugcuucugcc

SEQ ID NO: 119 - RNA, 22 nt, Artificial Sequence
  SAMD9 targeting guide sequence portion
acgugucuuuuuaccugggauu

SEQ ID NO: 120 - RNA, 22 nt, Artificial Sequence
  SAMD9 targeting guide sequence portion
acguucucuaugcuucugccac

SEQ ID NO: 121 - RNA, 22 nt, Artificial Sequence
  SAMD9 targeting guide sequence portion
acuuagaaguggcagaagcaua

SEQ ID NO: 122 - RNA, 22 nt, Artificial Sequence
  SAMD9 targeting guide sequence portion
agaacgugucuuuuuaccuggg

SEQ ID NO: 123 - RNA, 22 nt, Artificial Sequence
  SAMD9 targeting guide sequence portion
agaagcauagagaacgugucuu

SEQ ID NO: 124 - RNA, 22 nt, Artificial Sequence
  SAMD9 targeting guide sequence portion
agaaguggcagaagcauagaga

SEQ ID NO: 125 - RNA, 22 nt, Artificial Sequence
  SAMD9 targeting guide sequence portion
agacacguucucuaugcuucug

SEQ ID NO: 126 - RNA, 22 nt, Artificial Sequence
  SAMD9 targeting guide sequence portion
agagaacgugucuuuuuaccug

SEQ ID NO: 127 - RNA, 22 nt, Artificial Sequence
  SAMD9 targeting guide sequence portion
agcauagagaacgugucuuuuu

SEQ ID NO: 128 - RNA, 22 nt, Artificial Sequence
  SAMD9 targeting guide sequence portion
agguaaaaagacacguucucua

SEQ ID NO: 129 - RNA, 22 nt, Artificial Sequence
  SAMD9 targeting guide sequence portion
aguggcagaagcauagagaacg

SEQ ID NO: 130 - RNA, 22 nt, Artificial Sequence
  SAMD9 targeting guide sequence portion
auagagaacgugucuuuuuacc

SEQ ID NO: 131 - RNA, 22 nt, Artificial Sequence
  SAMD9 targeting guide sequence portion
aucccagguaaaaagacacguu

SEQ ID NO: 132 - RNA, 22 nt, Artificial Sequence
  SAMD9 targeting guide sequence portion
auggaaaaucccagguaaaaag

SEQ ID NO: 133 - RNA, 22 nt, Artificial Sequence
  SAMD9 targeting guide sequence portion
cacguucucuaugcuucugcca

SEQ ID NO: 134 - RNA, 22 nt, Artificial Sequence
  SAMD9 targeting guide sequence portion
cagaagcauagagaacgugucu

SEQ ID NO: 135 - RNA, 22 nt, Artificial Sequence
  SAMD9 targeting guide sequence portion
cagguaaaaagacacguucucu

SEQ ID NO: 136 - RNA, 22 nt, Artificial Sequence
  SAMD9 targeting guide sequence portion
cauagagaacgugucuuuuuac

SEQ ID NO: 137 - RNA, 22 nt, Artificial Sequence
  SAMD9 targeting guide sequence portion
ccagguaaaaagacacguucuc

SEQ ID NO: 138 - RNA, 22 nt, Artificial Sequence
  SAMD9 targeting guide sequence portion
cccagguaaaaagacacguucu

SEQ ID NO: 139 - RNA, 22 nt, Artificial Sequence
  SAMD9 targeting guide sequence portion
cgugucuuuuuaccugggauuu

SEQ ID NO: 140 - RNA, 22 nt, Artificial Sequence
  SAMD9 targeting guide sequence portion
cguucucuaugcuucugccacu

SEQ ID NO: 141 - RNA, 22 nt, Artificial Sequence
  SAMD9 targeting guide sequence portion
cuuagaaguggcagaagcauag

SEQ ID NO: 142 - RNA, 22 nt, Artificial Sequence
  SAMD9 targeting guide sequence portion
gaaaaucccagguaaaaagaca

SEQ ID NO: 143 - RNA, 22 nt, Artificial Sequence
  SAMD9 targeting guide sequence portion
gaacgugucuuuuuaccuggga

SEQ ID NO: 144 - RNA, 22 nt, Artificial Sequence
  SAMD9 targeting guide sequence portion
gaagcauagagaacgugucuuu

SEQ ID NO: 145 - RNA, 22 nt, Artificial Sequence
  SAMD9 targeting guide sequence portion
gaaguggcagaagcauagagaa

SEQ ID NO: 146 - RNA, 22 nt, Artificial Sequence
  SAMD9 targeting guide sequence portion
gacacguucucuaugcuucugc

SEQ ID NO: 147 - RNA, 22 nt, Artificial Sequence
  SAMD9 targeting guide sequence portion
gagaacgugucuuuuuaccugg

SEQ ID NO: 148 - RNA, 22 nt, Artificial Sequence
  SAMD9 targeting guide sequence portion
gcagaagcauagagaacguguc

SEQ ID NO: 149 - RNA, 22 nt, Artificial Sequence
  SAMD9 targeting guide sequence portion
gcauagagaacgugucuuuuua

SEQ ID NO: 150 - RNA, 22 nt, Artificial Sequence
  SAMD9 targeting guide sequence portion
ggaaaaucccagguaaaaagac

SEQ ID NO: 151 - RNA, 22 nt, Artificial Sequence
  SAMD9 targeting guide sequence portion
ggcagaagcauagagaacgugu

SEQ ID NO: 152 - RNA, 22 nt, Artificial Sequence
  SAMD9 targeting guide sequence portion
gguaaaaagacacguucucuau

SEQ ID NO: 153 - RNA, 22 nt, Artificial Sequence
  SAMD9 targeting guide sequence portion
guaaaaagacacguucucuaug

SEQ ID NO: 154 - RNA, 22 nt, Artificial Sequence
  SAMD9 targeting guide sequence portion
guggcagaagcauagagaacgu

SEQ ID NO: 155 - RNA, 22 nt, Artificial Sequence
  SAMD9 targeting guide sequence portion
guucucuaugcuucugccacuu

SEQ ID NO: 156 - RNA, 22 nt, Artificial Sequence
  SAMD9 targeting guide sequence portion
uaaaaagacacguucucuaugc

SEQ ID NO: 157 - RNA, 22 nt, Artificial Sequence
  SAMD9 targeting guide sequence portion
uagaaguggcagaagcauagag

SEQ ID NO: 158 - RNA, 22 nt, Artificial Sequence
  SAMD9 targeting guide sequence portion
uagagaacgugucuuuuuaccu

SEQ ID NO: 159 - RNA, 22 nt, Artificial Sequence
  SAMD9 targeting guide sequence portion
ucccagguaaaaagacacguuc

SEQ ID NO: 160 - RNA, 22 nt, Artificial Sequence
  SAMD9 targeting guide sequence portion
uggaaaaucccagguaaaaaga

SEQ ID NO: 161 - RNA, 22 nt, Artificial Sequence
  SAMD9 targeting guide sequence portion
uggcagaagcauagagaacgug

SEQ ID NO: 162 - RNA, 22 nt, Artificial Sequence
  SAMD9 targeting guide sequence portion
uuagaaguggcagaagcauaga

SEQ ID NO: 163 - RNA, 20 nt, Artificial Sequence
  SAMD9 targeting guide sequence portion
aaaaaagcggaagugauggg

SEQ ID NO: 164 - RNA, 20 nt, Artificial Sequence
  SAMD9 targeting guide sequence portion
aaaaaaucacaauacccauc

SEQ ID NO: 165 - RNA, 20 nt, Artificial Sequence
  SAMD9 targeting guide sequence portion
aaaaagcggaagugaugggu

SEQ ID NO: 166 - RNA, 20 nt, Artificial Sequence
  SAMD9 targeting guide sequence portion
aaaaaucacaauacccauca

SEQ ID NO: 167 - RNA, 20 nt, Artificial Sequence
  SAMD9 targeting guide sequence portion
aaaagcggaagugaugggua

SEQ ID NO: 168 - RNA, 20 nt, Artificial Sequence
  SAMD9 targeting guide sequence portion
aaaaucacaauacccaucac

SEQ ID NO: 169 - RNA, 20 nt, Artificial Sequence
  SAMD9 targeting guide sequence portion
aaagcggaagugauggguau

SEQ ID NO: 170 - RNA, 20 nt, Artificial Sequence
  SAMD9 targeting guide sequence portion
aaaucacaauacccaucacu

SEQ ID NO: 171 - RNA, 20 nt, Artificial Sequence
  SAMD9 targeting guide sequence portion
aagcggaagugauggguauu

SEQ ID NO: 172 - RNA, 20 nt, Artificial Sequence
  SAMD9 targeting guide sequence portion
aagugauggguauugugauu

SEQ ID NO: 173 - RNA, 20 nt, Artificial Sequence
  SAMD9 targeting guide sequence portion
aaguugaccuaaaaaagcgg

SEQ ID NO: 174 - RNA, 20 nt, Artificial Sequence
  SAMD9 targeting guide sequence portion
aauacccaucacuuccgcuu

SEQ ID NO: 175 - RNA, 20 nt, Artificial Sequence
  SAMD9 targeting guide sequence portion
aaucacaauacccaucacuu

SEQ ID NO: 176 - RNA, 20 nt, Artificial Sequence
  SAMD9 targeting guide sequence portion
acaauacccaucacuuccgc

SEQ ID NO: 177 - RNA, 20 nt, Artificial Sequence
  SAMD9 targeting guide sequence portion
acccaucacuuccgcuuuuu

SEQ ID NO: 178 - RNA, 20 nt, Artificial Sequence
  SAMD9 targeting guide sequence portion
accuaaaaaagcggaaguga

SEQ ID NO: 179 - RNA, 20 nt, Artificial Sequence
  SAMD9 targeting guide sequence portion
acuuccgcuuuuuuagguca

SEQ ID NO: 180 - RNA, 20 nt, Artificial Sequence
  SAMD9 targeting guide sequence portion
agcggaagugauggguauug

SEQ ID NO: 181 - RNA, 20 nt, Artificial Sequence
  SAMD9 targeting guide sequence portion
aguugaccuaaaaaagcgga

SEQ ID NO: 182 - RNA, 20 nt, Artificial Sequence
  SAMD9 targeting guide sequence portion
auacccaucacuuccgcuuu

SEQ ID NO: 183 - RNA, 20 nt, Artificial Sequence
  SAMD9 targeting guide sequence portion
aucacaauacccaucacuuc

SEQ ID NO: 184 - RNA, 20 nt, Artificial Sequence
  SAMD9 targeting guide sequence portion
aucacuuccgcuuuuuuagg

SEQ ID NO: 185 - RNA, 20 nt, Artificial Sequence
  SAMD9 targeting guide sequence portion
caauacccaucacuuccgcu

SEQ ID NO: 186 - RNA, 20 nt, Artificial Sequence
  SAMD9 targeting guide sequence portion
cacaauacccaucacuuccg

SEQ ID NO: 187 - RNA, 20 nt, Artificial Sequence
  SAMD9 targeting guide sequence portion
cacuuccgcuuuuuuagguc

SEQ ID NO: 188 - RNA, 20 nt, Artificial Sequence
  SAMD9 targeting guide sequence portion
caucacuuccgcuuuuuuag

SEQ ID NO: 189 - RNA, 20 nt, Artificial Sequence
  SAMD9 targeting guide sequence portion
ccaucacuuccgcuuuuuua

SEQ ID NO: 190 - RNA, 20 nt, Artificial Sequence
  SAMD9 targeting guide sequence portion
cccaucacuuccgcuuuuuu

SEQ ID NO: 191 - RNA, 20 nt, Artificial Sequence
  SAMD9 targeting guide sequence portion
ccuaaaaaagcggaagugau

SEQ ID NO: 192 - RNA, 20 nt, Artificial Sequence
  SAMD9 targeting guide sequence portion
cggaagugauggguauugug

SEQ ID NO: 193 - RNA, 20 nt, Artificial Sequence
  SAMD9 targeting guide sequence portion
cuaaaaaagcggaagugaug

SEQ ID NO: 194 - RNA, 20 nt, Artificial Sequence
  SAMD9 targeting guide sequence portion
cuaaguugaccuaaaaaagc

SEQ ID NO: 195 - RNA, 20 nt, Artificial Sequence
  SAMD9 targeting guide sequence portion
cuuccgcuuuuuuaggucaa

SEQ ID NO: 196 - RNA, 20 nt, Artificial Sequence
  SAMD9 targeting guide sequence portion
cuucuaaguugaccuaaaaa

SEQ ID NO: 197 - RNA, 20 nt, Artificial Sequence
  SAMD9 targeting guide sequence portion
gaaaaaaucacaauacccau

SEQ ID NO: 198 - RNA, 20 nt, Artificial Sequence
  SAMD9 targeting guide sequence portion
gaagugauggguauugugau

SEQ ID NO: 199 - RNA, 20 nt, Artificial Sequence
  SAMD9 targeting guide sequence portion
gaccuaaaaaagcggaagug

SEQ ID NO: 200 - RNA, 20 nt, Artificial Sequence
  SAMD9 targeting guide sequence portion
gcggaagugauggguauugu

SEQ ID NO: 201 - RNA, 20 nt, Artificial Sequence
  SAMD9 targeting guide sequence portion
ggaagugauggguauuguga

SEQ ID NO: 202 - RNA, 20 nt, Artificial Sequence
  SAMD9 targeting guide sequence portion
guugaccuaaaaaagcggaa

SEQ ID NO: 203 - RNA, 20 nt, Artificial Sequence
  SAMD9 targeting guide sequence portion
uaaaaaagcggaagugaugg

SEQ ID NO: 204 - RNA, 20 nt, Artificial Sequence
  SAMD9 targeting guide sequence portion
uaaguugaccuaaaaaagcg

SEQ ID NO: 205 - RNA, 20 nt, Artificial Sequence
  SAMD9 targeting guide sequence portion
uacccaucacuuccgcuuuu

SEQ ID NO: 206 - RNA, 20 nt, Artificial Sequence
  SAMD9 targeting guide sequence portion
ucacaauacccaucacuucc

SEQ ID NO: 207 - RNA, 20 nt, Artificial Sequence
  SAMD9 targeting guide sequence portion
ucacuuccgcuuuuuuaggu

SEQ ID NO: 208 - RNA, 20 nt, Artificial Sequence
  SAMD9 targeting guide sequence portion
uccgcuuuuuuaggucaacu

SEQ ID NO: 209 - RNA, 20 nt, Artificial Sequence
  SAMD9 targeting guide sequence portion
ucuaaguugaccuaaaaaag

SEQ ID NO: 210 - RNA, 20 nt, Artificial Sequence
  SAMD9 targeting guide sequence portion
ugaaaaaaucacaauaccca

SEQ ID NO: 211 - RNA, 20 nt, Artificial Sequence
  SAMD9 targeting guide sequence portion
ugaccuaaaaaagcggaagu

SEQ ID NO: 212 - RNA, 20 nt, Artificial Sequence
  SAMD9 targeting guide sequence portion
uuccgcuuuuuuaggucaac

SEQ ID NO: 213 - RNA, 20 nt, Artificial Sequence
  SAMD9 targeting guide sequence portion
uucuaaguugaccuaaaaaa

SEQ ID NO: 214 - RNA, 20 nt, Artificial Sequence
  SAMD9 targeting guide sequence portion
uugaccuaaaaaagcggaag

SEQ ID NO: 215 - RNA, 21 nt, Artificial Sequence
  SAMD9 targeting guide sequence portion
aaaaaagcggaagugaugggu

SEQ ID NO: 216 - RNA, 21 nt, Artificial Sequence
  SAMD9 targeting guide sequence portion
aaaaaaucacaauacccauca

SEQ ID NO: 217 - RNA, 21 nt, Artificial Sequence
  SAMD9 targeting guide sequence portion
aaaaagcggaagugaugggua

SEQ ID NO: 218 - RNA, 21 nt, Artificial Sequence
  SAMD9 targeting guide sequence portion
aaaaaucacaauacccaucac

SEQ ID NO: 219 - RNA, 21 nt, Artificial Sequence
  SAMD9 targeting guide sequence portion
aaaagcggaagugauggguau

SEQ ID NO: 220 - RNA, 21 nt, Artificial Sequence
  SAMD9 targeting guide sequence portion
aaaaucacaauacccaucacu

SEQ ID NO: 221 - RNA, 21 nt, Artificial Sequence
  SAMD9 targeting guide sequence portion
aaagcggaagugauggguauu

SEQ ID NO: 222 - RNA, 21 nt, Artificial Sequence
  SAMD9 targeting guide sequence portion
aaaucacaauacccaucacuu

SEQ ID NO: 223 - RNA, 21 nt, Artificial Sequence
  SAMD9 targeting guide sequence portion
aagcggaagugauggguauug

SEQ ID NO: 224 - RNA, 21 nt, Artificial Sequence
  SAMD9 targeting guide sequence portion
aagugauggguauugugauuu

SEQ ID NO: 225 - RNA, 21 nt, Artificial Sequence
  SAMD9 targeting guide sequence portion
aaguugaccuaaaaaagcgga

SEQ ID NO: 226 - RNA, 21 nt, Artificial Sequence
  SAMD9 targeting guide sequence portion
aauacccaucacuuccgcuuu

SEQ ID NO: 227 - RNA, 21 nt, Artificial Sequence
  SAMD9 targeting guide sequence portion
aaucacaauacccaucacuuc

SEQ ID NO: 228 - RNA, 21 nt, Artificial Sequence
  SAMD9 targeting guide sequence portion
acaauacccaucacuuccgcu

SEQ ID NO: 229 - RNA, 21 nt, Artificial Sequence
  SAMD9 targeting guide sequence portion
acccaucacuuccgcuuuuuu

SEQ ID NO: 230 - RNA, 21 nt, Artificial Sequence
  SAMD9 targeting guide sequence portion
accuaaaaaagcggaagugau

SEQ ID NO: 231 - RNA, 21 nt, Artificial Sequence
  SAMD9 targeting guide sequence portion
acuuccgcuuuuuuaggucaa

SEQ ID NO: 232 - RNA, 21 nt, Artificial Sequence
  SAMD9 targeting guide sequence portion
acuucuaaguugaccuaaaaa

SEQ ID NO: 233 - RNA, 21 nt, Artificial Sequence
  SAMD9 targeting guide sequence portion
agcggaagugauggguauugu

SEQ ID NO: 234 - RNA, 21 nt, Artificial Sequence
  SAMD9 targeting guide sequence portion
aguugaccuaaaaaagcggaa

SEQ ID NO: 235 - RNA, 21 nt, Artificial Sequence
  SAMD9 targeting guide sequence portion
auacccaucacuuccgcuuuu

SEQ ID NO: 236 - RNA, 21 nt, Artificial Sequence
  SAMD9 targeting guide sequence portion
aucacaauacccaucacuucc

SEQ ID NO: 237 - RNA, 21 nt, Artificial Sequence
  SAMD9 targeting guide sequence portion
aucacuuccgcuuuuuuaggu

SEQ ID NO: 238 - RNA, 21 nt, Artificial Sequence
  SAMD9 targeting guide sequence portion
augaaaaaaucacaauaccca

SEQ ID NO: 239 - RNA, 21 nt, Artificial Sequence
  SAMD9 targeting guide sequence portion
caauacccaucacuuccgcuu

SEQ ID NO: 240 - RNA, 21 nt, Artificial Sequence
  SAMD9 targeting guide sequence portion
cacaauacccaucacuuccgc

SEQ ID NO: 241 - RNA, 21 nt, Artificial Sequence
  SAMD9 targeting guide sequence portion
cacuuccgcuuuuuuagguca

SEQ ID NO: 242 - RNA, 21 nt, Artificial Sequence
  SAMD9 targeting guide sequence portion
caucacuuccgcuuuuuuagg

SEQ ID NO: 243 - RNA, 21 nt, Artificial Sequence
  SAMD9 targeting guide sequence portion
ccaucacuuccgcuuuuuuag

SEQ ID NO: 244 - RNA, 21 nt, Artificial Sequence
  SAMD9 targeting guide sequence portion
cccaucacuuccgcuuuuuua

SEQ ID NO: 245 - RNA, 21 nt, Artificial Sequence
  SAMD9 targeting guide sequence portion
ccuaaaaaagcggaagugaug

SEQ ID NO: 246 - RNA, 21 nt, Artificial Sequence
  SAMD9 targeting guide sequence portion
cggaagugauggguauuguga

SEQ ID NO: 247 - RNA, 21 nt, Artificial Sequence
  SAMD9 targeting guide sequence portion
cuaaaaaagcggaagugaugg

SEQ ID NO: 248 - RNA, 21 nt, Artificial Sequence
  SAMD9 targeting guide sequence portion
cuaaguugaccuaaaaaagcg

SEQ ID NO: 249 - RNA, 21 nt, Artificial Sequence
  SAMD9 targeting guide sequence portion
cuuccgcuuuuuuaggucaac

SEQ ID NO: 250 - RNA, 21 nt, Artificial Sequence
  SAMD9 targeting guide sequence portion
cuucuaaguugaccuaaaaaa

SEQ ID NO: 251 - RNA, 21 nt, Artificial Sequence
  SAMD9 targeting guide sequence portion
gaaaaaaucacaauacccauc

SEQ ID NO: 252 - RNA, 21 nt, Artificial Sequence
  SAMD9 targeting guide sequence portion
gaagugauggguauugugauu

SEQ ID NO: 253 - RNA, 21 nt, Artificial Sequence
  SAMD9 targeting guide sequence portion
gaccuaaaaaagcggaaguga

SEQ ID NO: 254 - RNA, 21 nt, Artificial Sequence
  SAMD9 targeting guide sequence portion
gcggaagugauggguauugug

SEQ ID NO: 255 - RNA, 21 nt, Artificial Sequence
  SAMD9 targeting guide sequence portion
ggaagugauggguauugugau

SEQ ID NO: 256 - RNA, 21 nt, Artificial Sequence
  SAMD9 targeting guide sequence portion
guugaccuaaaaaagcggaag

SEQ ID NO: 257 - RNA, 21 nt, Artificial Sequence
  SAMD9 targeting guide sequence portion
uaaaaaagcggaagugauggg

SEQ ID NO: 258 - RNA, 21 nt, Artificial Sequence
  SAMD9 targeting guide sequence portion
uaaguugaccuaaaaaagcgg

SEQ ID NO: 259 - RNA, 21 nt, Artificial Sequence
  SAMD9 targeting guide sequence portion
uacccaucacuuccgcuuuuu

SEQ ID NO: 260 - RNA, 21 nt, Artificial Sequence
  SAMD9 targeting guide sequence portion
ucacaauacccaucacuuccg

SEQ ID NO: 261 - RNA, 21 nt, Artificial Sequence
  SAMD9 targeting guide sequence portion
ucacuuccgcuuuuuuagguc

SEQ ID NO: 262 - RNA, 21 nt, Artificial Sequence
  SAMD9 targeting guide sequence portion
uccgcuuuuuuaggucaacuu

SEQ ID NO: 263 - RNA, 21 nt, Artificial Sequence
  SAMD9 targeting guide sequence portion
ucuaaguugaccuaaaaaagc

SEQ ID NO: 264 - RNA, 21 nt, Artificial Sequence
  SAMD9 targeting guide sequence portion
ugaaaaaaucacaauacccau

SEQ ID NO: 265 - RNA, 21 nt, Artificial Sequence
  SAMD9 targeting guide sequence portion
ugaccuaaaaaagcggaagug

SEQ ID NO: 266 - RNA, 21 nt, Artificial Sequence
  SAMD9 targeting guide sequence portion
uuccgcuuuuuuaggucaacu

SEQ ID NO: 267 - RNA, 21 nt, Artificial Sequence
  SAMD9 targeting guide sequence portion
uucuaaguugaccuaaaaaag

SEQ ID NO: 268 - RNA, 21 nt, Artificial Sequence
  SAMD9 targeting guide sequence portion
uugaccuaaaaaagcggaagu

SEQ ID NO: 269 - RNA, 22 nt, Artificial Sequence
  SAMD9 targeting guide sequence portion
aaaaaagcggaagugaugggua

SEQ ID NO: 270 - RNA, 22 nt, Artificial Sequence
  SAMD9 targeting guide sequence portion
aaaaaaucacaauacccaucac

SEQ ID NO: 271 - RNA, 22 nt, Artificial Sequence
  SAMD9 targeting guide sequence portion
aaaaagcggaagugauggguau

SEQ ID NO: 272 - RNA, 22 nt, Artificial Sequence
  SAMD9 targeting guide sequence portion
aaaaaucacaauacccaucacu

SEQ ID NO: 273 - RNA, 22 nt, Artificial Sequence
  SAMD9 targeting guide sequence portion
aaaagcggaagugauggguauu

SEQ ID NO: 274 - RNA, 22 nt, Artificial Sequence
  SAMD9 targeting guide sequence portion
aaaaucacaauacccaucacuu

SEQ ID NO: 275 - RNA, 22 nt, Artificial Sequence
  SAMD9 targeting guide sequence portion
aaagcggaagugauggguauug

SEQ ID NO: 276 - RNA, 22 nt, Artificial Sequence
  SAMD9 targeting guide sequence portion
aaaucacaauacccaucacuuc

SEQ ID NO: 277 - RNA, 22 nt, Artificial Sequence
  SAMD9 targeting guide sequence portion
aagcggaagugauggguauugu

SEQ ID NO: 278 - RNA, 22 nt, Artificial Sequence
  SAMD9 targeting guide sequence portion
aagugauggguauugugauuuu

SEQ ID NO: 279 - RNA, 22 nt, Artificial Sequence
  SAMD9 targeting guide sequence portion
aaguugaccuaaaaaagcggaa

SEQ ID NO: 280 - RNA, 22 nt, Artificial Sequence
  SAMD9 targeting guide sequence portion
aauacccaucacuuccgcuuuu

SEQ ID NO: 281 - RNA, 22 nt, Artificial Sequence
  SAMD9 targeting guide sequence portion
aaucacaauacccaucacuucc

SEQ ID NO: 282 - RNA, 22 nt, Artificial Sequence
  SAMD9 targeting guide sequence portion
aaugaaaaaaucacaauaccca

SEQ ID NO: 283 - RNA, 22 nt, Artificial Sequence
  SAMD9 targeting guide sequence portion
acaauacccaucacuuccgcuu

SEQ ID NO: 284 - RNA, 22 nt, Artificial Sequence
  SAMD9 targeting guide sequence portion
acccaucacuuccgcuuuuuua

SEQ ID NO: 285 - RNA, 22 nt, Artificial Sequence
  SAMD9 targeting guide sequence portion
accuaaaaaagcggaagugaug

SEQ ID NO: 286 - RNA, 22 nt, Artificial Sequence
  SAMD9 targeting guide sequence portion
acuuccgcuuuuuuaggucaac

SEQ ID NO: 287 - RNA, 22 nt, Artificial Sequence
  SAMD9 targeting guide sequence portion
acuucuaaguugaccuaaaaaa

SEQ ID NO: 288 - RNA, 22 nt, Artificial Sequence
  SAMD9 targeting guide sequence portion
agcggaagugauggguauugug

SEQ ID NO: 289 - RNA, 22 nt, Artificial Sequence
  SAMD9 targeting guide sequence portion
aguugaccuaaaaaagcggaag

SEQ ID NO: 290 - RNA, 22 nt, Artificial Sequence
  SAMD9 targeting guide sequence portion
auacccaucacuuccgcuuuuu

SEQ ID NO: 291 - RNA, 22 nt, Artificial Sequence
  SAMD9 targeting guide sequence portion
aucacaauacccaucacuuccg

SEQ ID NO: 292 - RNA, 22 nt, Artificial Sequence
  SAMD9 targeting guide sequence portion
aucacuuccgcuuuuuuagguc

SEQ ID NO: 293 - RNA, 22 nt, Artificial Sequence
  SAMD9 targeting guide sequence portion
augaaaaaaucacaauacccau

SEQ ID NO: 294 - RNA, 22 nt, Artificial Sequence
  SAMD9 targeting guide sequence portion
caauacccaucacuuccgcuuu

SEQ ID NO: 295 - RNA, 22 nt, Artificial Sequence
  SAMD9 targeting guide sequence portion
cacaauacccaucacuuccgcu

SEQ ID NO: 296 - RNA, 22 nt, Artificial Sequence
  SAMD9 targeting guide sequence portion
cacuuccgcuuuuuuaggucaa

SEQ ID NO: 297 - RNA, 22 nt, Artificial Sequence
  SAMD9 targeting guide sequence portion
cacuucuaaguugaccuaaaaa

SEQ ID NO: 298 - RNA, 22 nt, Artificial Sequence
  SAMD9 targeting guide sequence portion
caucacuuccgcuuuuuuaggu

SEQ ID NO: 299 - RNA, 22 nt, Artificial Sequence
  SAMD9 targeting guide sequence portion
ccaucacuuccgcuuuuuuagg

SEQ ID NO: 300 - RNA, 22 nt, Artificial Sequence
  SAMD9 targeting guide sequence portion
cccaucacuuccgcuuuuuuag

SEQ ID NO: 301 - RNA, 22 nt, Artificial Sequence
  SAMD9 targeting guide sequence portion
ccuaaaaaagcggaagugaugg

SEQ ID NO: 302 - RNA, 22 nt, Artificial Sequence
  SAMD9 targeting guide sequence portion
cggaagugauggguauugugau

SEQ ID NO: 303 - RNA, 22 nt, Artificial Sequence
  SAMD9 targeting guide sequence portion
cuaaaaaagcggaagugauggg

SEQ ID NO: 304 - RNA, 22 nt, Artificial Sequence
  SAMD9 targeting guide sequence portion
cuaaguugaccuaaaaaagcgg

SEQ ID NO: 305 - RNA, 22 nt, Artificial Sequence
  SAMD9 targeting guide sequence portion
cuuccgcuuuuuuaggucaacu

SEQ ID NO: 306 - RNA, 22 nt, Artificial Sequence
  SAMD9 targeting guide sequence portion
cuucuaaguugaccuaaaaaag

SEQ ID NO: 307 - RNA, 22 nt, Artificial Sequence
  SAMD9 targeting guide sequence portion
gaaaaaaucacaauacccauca

SEQ ID NO: 308 - RNA, 22 nt, Artificial Sequence
  SAMD9 targeting guide sequence portion
gaagugauggguauugugauuu

SEQ ID NO: 309 - RNA, 22 nt, Artificial Sequence
  SAMD9 targeting guide sequence portion
gaccuaaaaaagcggaagugau

SEQ ID NO: 310 - RNA, 22 nt, Artificial Sequence
  SAMD9 targeting guide sequence portion
gcggaagugauggguauuguga

SEQ ID NO: 311 - RNA, 22 nt, Artificial Sequence
  SAMD9 targeting guide sequence portion
ggaagugauggguauugugauu

SEQ ID NO: 312 - RNA, 22 nt, Artificial Sequence
  SAMD9 targeting guide sequence portion
guugaccuaaaaaagcggaagu

SEQ ID NO: 313 - RNA, 22 nt, Artificial Sequence
  SAMD9 targeting guide sequence portion
uaaaaaagcggaagugaugggu

SEQ ID NO: 314 - RNA, 22 nt, Artificial Sequence
  SAMD9 targeting guide sequence portion
uaaguugaccuaaaaaagcgga

SEQ ID NO: 315 - RNA, 22 nt, Artificial Sequence
  SAMD9 targeting guide sequence portion
uacccaucacuuccgcuuuuuu

SEQ ID NO: 316 - RNA, 22 nt, Artificial Sequence
  SAMD9 targeting guide sequence portion
ucacaauacccaucacuuccgc

SEQ ID NO: 317 - RNA, 22 nt, Artificial Sequence
  SAMD9 targeting guide sequence portion
ucacuuccgcuuuuuuagguca

SEQ ID NO: 318 - RNA, 22 nt, Artificial Sequence
  SAMD9 targeting guide sequence portion
uccgcuuuuuuaggucaacuua

SEQ ID NO: 319 - RNA, 22 nt, Artificial Sequence
  SAMD9 targeting guide sequence portion
ucuaaguugaccuaaaaaagcg

SEQ ID NO: 320 - RNA, 22 nt, Artificial Sequence
  SAMD9 targeting guide sequence portion
ugaaaaaaucacaauacccauc

SEQ ID NO: 321 - RNA, 22 nt, Artificial Sequence
  SAMD9 targeting guide sequence portion
ugaccuaaaaaagcggaaguga

SEQ ID NO: 322 - RNA, 22 nt, Artificial Sequence
  SAMD9 targeting guide sequence portion
uuccgcuuuuuuaggucaacuu

SEQ ID NO: 323 - RNA, 22 nt, Artificial Sequence
  SAMD9 targeting guide sequence portion
uucuaaguugaccuaaaaaagc

SEQ ID NO: 324 - RNA, 22 nt, Artificial Sequence
  SAMD9 targeting guide sequence portion
uugaccuaaaaaagcggaagug

SEQ ID NO: 325 - RNA, 20 nt, Artificial Sequence
  SAMD9 targeting guide sequence portion
aaaaaguccaagaacuuuug

SEQ ID NO: 326 - RNA, 20 nt, Artificial Sequence
  SAMD9 targeting guide sequence portion
aaaaguccaagaacuuuugc

SEQ ID NO: 327 - RNA, 20 nt, Artificial Sequence
  SAMD9 targeting guide sequence portion
aaaguccaagaacuuuugcu

SEQ ID NO: 328 - RNA, 20 nt, Artificial Sequence
  SAMD9 targeting guide sequence portion
aaaugaagcaaaaguucuug

SEQ ID NO: 329 - RNA, 20 nt, Artificial Sequence
  SAMD9 targeting guide sequence portion
aacuuuugcuucauuuacaa

SEQ ID NO: 330 - RNA, 20 nt, Artificial Sequence
  SAMD9 targeting guide sequence portion
aagaacuuuugcuucauuua

SEQ ID NO: 331 - RNA, 20 nt, Artificial Sequence
  SAMD9 targeting guide sequence portion
aaguccaagaacuuuugcuu

SEQ ID NO: 332 - RNA, 20 nt, Artificial Sequence
  SAMD9 targeting guide sequence portion
aaugaagcaaaaguucuugg

SEQ ID NO: 333 - RNA, 20 nt, Artificial Sequence
  SAMD9 targeting guide sequence portion
accuuguaaaugaagcaaaa

SEQ ID NO: 334 - RNA, 20 nt, Artificial Sequence
  SAMD9 targeting guide sequence portion
acuuuugcuucauuuacaag

SEQ ID NO: 335 - RNA, 20 nt, Artificial Sequence
  SAMD9 targeting guide sequence portion
agaacuuuugcuucauuuac

SEQ ID NO: 336 - RNA, 20 nt, Artificial Sequence
  SAMD9 targeting guide sequence portion
agcucgaccuuguaaaugaa

SEQ ID NO: 337 - RNA, 20 nt, Artificial Sequence
  SAMD9 targeting guide sequence portion
aguccaagaacuuuugcuuc

SEQ ID NO: 338 - RNA, 20 nt, Artificial Sequence
  SAMD9 targeting guide sequence portion
augaagcaaaaguucuugga

SEQ ID NO: 339 - RNA, 20 nt, Artificial Sequence
  SAMD9 targeting guide sequence portion
auuguuuucagcucgaccuu

SEQ ID NO: 340 - RNA, 20 nt, Artificial Sequence
  SAMD9 targeting guide sequence portion
auuuacaaggucgagcugaa

SEQ ID NO: 341 - RNA, 20 nt, Artificial Sequence
  SAMD9 targeting guide sequence portion
caagaacuuuugcuucauuu

SEQ ID NO: 342 - RNA, 20 nt, Artificial Sequence
  SAMD9 targeting guide sequence portion
cagcucgaccuuguaaauga

SEQ ID NO: 343 - RNA, 20 nt, Artificial Sequence
  SAMD9 targeting guide sequence portion
cauuuacaaggucgagcuga

SEQ ID NO: 344 - RNA, 20 nt, Artificial Sequence
  SAMD9 targeting guide sequence portion
ccaagaacuuuugcuucauu

SEQ ID NO: 345 - RNA, 20 nt, Artificial Sequence
  SAMD9 targeting guide sequence portion
ccuuguaaaugaagcaaaag

SEQ ID NO: 346 - RNA, 20 nt, Artificial Sequence
  SAMD9 targeting guide sequence portion
cgaccuuguaaaugaagcaa

SEQ ID NO: 347 - RNA, 20 nt, Artificial Sequence
  SAMD9 targeting guide sequence portion
cucgaccuuguaaaugaagc

SEQ ID NO: 348 - RNA, 20 nt, Artificial Sequence
  SAMD9 targeting guide sequence portion
cuucauuuacaaggucgagc

SEQ ID NO: 349 - RNA, 20 nt, Artificial Sequence
  SAMD9 targeting guide sequence portion
cuuguaaaugaagcaaaagu

SEQ ID NO: 350 - RNA, 20 nt, Artificial Sequence
  SAMD9 targeting guide sequence portion
cuuuugcuucauuuacaagg

SEQ ID NO: 351 - RNA, 20 nt, Artificial Sequence
  SAMD9 targeting guide sequence portion
gaaaaaguccaagaacuuuu

SEQ ID NO: 352 - RNA, 20 nt, Artificial Sequence
  SAMD9 targeting guide sequence portion
gaacuuuugcuucauuuaca

SEQ ID NO: 353 - RNA, 20 nt, Artificial Sequence
  SAMD9 targeting guide sequence portion
gaccuuguaaaugaagcaaa

SEQ ID NO: 354 - RNA, 20 nt, Artificial Sequence
  SAMD9 targeting guide sequence portion
gcucgaccuuguaaaugaag

SEQ ID NO: 355 - RNA, 20 nt, Artificial Sequence
  SAMD9 targeting guide sequence portion
gcuucauuuacaaggucgag

SEQ ID NO: 356 - RNA, 20 nt, Artificial Sequence
  SAMD9 targeting guide sequence portion
guaaaugaagcaaaaguucu

SEQ ID NO: 357 - RNA, 20 nt, Artificial Sequence
  SAMD9 targeting guide sequence portion
guccaagaacuuuugcuuca

SEQ ID NO: 358 - RNA, 20 nt, Artificial Sequence
  SAMD9 targeting guide sequence portion
guuuucagcucgaccuugua

SEQ ID NO: 359 - RNA, 20 nt, Artificial Sequence
  SAMD9 targeting guide sequence portion
uaaaugaagcaaaaguucuu

SEQ ID NO: 360 - RNA, 20 nt, Artificial Sequence
  SAMD9 targeting guide sequence portion
ucagcucgaccuuguaaaug

SEQ ID NO: 361 - RNA, 20 nt, Artificial Sequence
  SAMD9 targeting guide sequence portion
ucauuuacaaggucgagcug

SEQ ID NO: 362 - RNA, 20 nt, Artificial Sequence
  SAMD9 targeting guide sequence portion
uccaagaacuuuugcuucau

SEQ ID NO: 363 - RNA, 20 nt, Artificial Sequence
  SAMD9 targeting guide sequence portion
ucgaccuuguaaaugaagca

SEQ ID NO: 364 - RNA, 20 nt, Artificial Sequence
  SAMD9 targeting guide sequence portion
ugaagcaaaaguucuuggac

SEQ ID NO: 365 - RNA, 20 nt, Artificial Sequence
  SAMD9 targeting guide sequence portion
ugcuucauuuacaaggucga

SEQ ID NO: 366 - RNA, 20 nt, Artificial Sequence
  SAMD9 targeting guide sequence portion
uguaaaugaagcaaaaguuc

SEQ ID NO: 367 - RNA, 20 nt, Artificial Sequence
  SAMD9 targeting guide sequence portion
uguuuucagcucgaccuugu

SEQ ID NO: 368 - RNA, 20 nt, Artificial Sequence
  SAMD9 targeting guide sequence portion
uucagcucgaccuuguaaau

SEQ ID NO: 369 - RNA, 20 nt, Artificial Sequence
  SAMD9 targeting guide sequence portion
uucauuuacaaggucgagcu

SEQ ID NO: 370 - RNA, 20 nt, Artificial Sequence
  SAMD9 targeting guide sequence portion
uugcuucauuuacaaggucg

SEQ ID NO: 371 - RNA, 20 nt, Artificial Sequence
  SAMD9 targeting guide sequence portion
uuguaaaugaagcaaaaguu

SEQ ID NO: 372 - RNA, 20 nt, Artificial Sequence
  SAMD9 targeting guide sequence portion
uuguuuucagcucgaccuug

SEQ ID NO: 373 - RNA, 20 nt, Artificial Sequence
  SAMD9 targeting guide sequence portion
uuucagcucgaccuuguaaa

SEQ ID NO: 374 - RNA, 20 nt, Artificial Sequence
  SAMD9 targeting guide sequence portion
uuugcuucauuuacaagguc

SEQ ID NO: 375 - RNA, 20 nt, Artificial Sequence
  SAMD9 targeting guide sequence portion
uuuucagcucgaccuuguaa

SEQ ID NO: 376 - RNA, 20 nt, Artificial Sequence
  SAMD9 targeting guide sequence portion
uuuugcuucauuuacaaggu

SEQ ID NO: 377 - RNA, 21 nt, Artificial Sequence
  SAMD9 targeting guide sequence portion
aaaaaguccaagaacuuuugc

SEQ ID NO: 378 - RNA, 21 nt, Artificial Sequence
  SAMD9 targeting guide sequence portion
aaaaguccaagaacuuuugcu

SEQ ID NO: 379 - RNA, 21 nt, Artificial Sequence
  SAMD9 targeting guide sequence portion
aaaguccaagaacuuuugcuu

SEQ ID NO: 380 - RNA, 21 nt, Artificial Sequence
  SAMD9 targeting guide sequence portion
aaaugaagcaaaaguucuugg

SEQ ID NO: 381 - RNA, 21 nt, Artificial Sequence
  SAMD9 targeting guide sequence portion
aacuuuugcuucauuuacaag

SEQ ID NO: 382 - RNA, 21 nt, Artificial Sequence
  SAMD9 targeting guide sequence portion
aagaacuuuugcuucauuuac

SEQ ID NO: 383 - RNA, 21 nt, Artificial Sequence
  SAMD9 targeting guide sequence portion
aaguccaagaacuuuugcuuc

SEQ ID NO: 384 - RNA, 21 nt, Artificial Sequence
  SAMD9 targeting guide sequence portion
aaugaagcaaaaguucuugga

SEQ ID NO: 385 - RNA, 21 nt, Artificial Sequence
  SAMD9 targeting guide sequence portion
aauuguuuucagcucgaccuu

SEQ ID NO: 386 - RNA, 21 nt, Artificial Sequence
  SAMD9 targeting guide sequence portion
accuuguaaaugaagcaaaag

SEQ ID NO: 387 - RNA, 21 nt, Artificial Sequence
  SAMD9 targeting guide sequence portion
acuuuugcuucauuuacaagg

SEQ ID NO: 388 - RNA, 21 nt, Artificial Sequence
  SAMD9 targeting guide sequence portion
agaacuuuugcuucauuuaca

SEQ ID NO: 389 - RNA, 21 nt, Artificial Sequence
  SAMD9 targeting guide sequence portion
agcucgaccuuguaaaugaag

SEQ ID NO: 390 - RNA, 21 nt, Artificial Sequence
  SAMD9 targeting guide sequence portion
aguccaagaacuuuugcuuca

SEQ ID NO: 391 - RNA, 21 nt, Artificial Sequence
  SAMD9 targeting guide sequence portion
augaagcaaaaguucuuggac

SEQ ID NO: 392 - RNA, 21 nt, Artificial Sequence
  SAMD9 targeting guide sequence portion
auuguuuucagcucgaccuug

SEQ ID NO: 393 - RNA, 21 nt, Artificial Sequence
  SAMD9 targeting guide sequence portion
auuuacaaggucgagcugaaa

SEQ ID NO: 394 - RNA, 21 nt, Artificial Sequence
  SAMD9 targeting guide sequence portion
caagaacuuuugcuucauuua

SEQ ID NO: 395 - RNA, 21 nt, Artificial Sequence
  SAMD9 targeting guide sequence portion
cagcucgaccuuguaaaugaa

SEQ ID NO: 396 - RNA, 21 nt, Artificial Sequence
  SAMD9 targeting guide sequence portion
cauuuacaaggucgagcugaa

SEQ ID NO: 397 - RNA, 21 nt, Artificial Sequence
  SAMD9 targeting guide sequence portion
ccaagaacuuuugcuucauuu

SEQ ID NO: 398 - RNA, 21 nt, Artificial Sequence
  SAMD9 targeting guide sequence portion
ccuuguaaaugaagcaaaagu

SEQ ID NO: 399 - RNA, 21 nt, Artificial Sequence
  SAMD9 targeting guide sequence portion
cgaccuuguaaaugaagcaaa

SEQ ID NO: 400 - RNA, 21 nt, Artificial Sequence
  SAMD9 targeting guide sequence portion
cucgaccuuguaaaugaagca

SEQ ID NO: 401 - RNA, 21 nt, Artificial Sequence
  SAMD9 targeting guide sequence portion
cuucauuuacaaggucgagcu

SEQ ID NO: 402 - RNA, 21 nt, Artificial Sequence
  SAMD9 targeting guide sequence portion
cuuguaaaugaagcaaaaguu

SEQ ID NO: 403 - RNA, 21 nt, Artificial Sequence
  SAMD9 targeting guide sequence portion
cuuuugcuucauuuacaaggu

SEQ ID NO: 404 - RNA, 21 nt, Artificial Sequence
  SAMD9 targeting guide sequence portion
gaaaaaguccaagaacuuuug

SEQ ID NO: 405 - RNA, 21 nt, Artificial Sequence
  SAMD9 targeting guide sequence portion
gaacuuuugcuucauuuacaa

SEQ ID NO: 406 - RNA, 21 nt, Artificial Sequence
  SAMD9 targeting guide sequence portion
gaccuuguaaaugaagcaaaa

SEQ ID NO: 407 - RNA, 21 nt, Artificial Sequence
  SAMD9 targeting guide sequence portion
gcucgaccuuguaaaugaagc

SEQ ID NO: 408 - RNA, 21 nt, Artificial Sequence
  SAMD9 targeting guide sequence portion
gcuucauuuacaaggucgagc

SEQ ID NO: 409 - RNA, 21 nt, Artificial Sequence
  SAMD9 targeting guide sequence portion
ggaaaaaguccaagaacuuuu

SEQ ID NO: 410 - RNA, 21 nt, Artificial Sequence
  SAMD9 targeting guide sequence portion
guaaaugaagcaaaaguucuu

SEQ ID NO: 411 - RNA, 21 nt, Artificial Sequence
  SAMD9 targeting guide sequence portion
guccaagaacuuuugcuucau

SEQ ID NO: 412 - RNA, 21 nt, Artificial Sequence
  SAMD9 targeting guide sequence portion
guuuucagcucgaccuuguaa

SEQ ID NO: 413 - RNA, 21 nt, Artificial Sequence
  SAMD9 targeting guide sequence portion
uaaaugaagcaaaaguucuug

SEQ ID NO: 414 - RNA, 21 nt, Artificial Sequence
  SAMD9 targeting guide sequence portion
ucagcucgaccuuguaaauga

SEQ ID NO: 415 - RNA, 21 nt, Artificial Sequence
  SAMD9 targeting guide sequence portion
ucauuuacaaggucgagcuga

SEQ ID NO: 416 - RNA, 21 nt, Artificial Sequence
  SAMD9 targeting guide sequence portion
uccaagaacuuuugcuucauu

SEQ ID NO: 417 - RNA, 21 nt, Artificial Sequence
  SAMD9 targeting guide sequence portion
ucgaccuuguaaaugaagcaa

SEQ ID NO: 418 - RNA, 21 nt, Artificial Sequence
  SAMD9 targeting guide sequence portion
ugaagcaaaaguucuuggacu

SEQ ID NO: 419 - RNA, 21 nt, Artificial Sequence
  SAMD9 targeting guide sequence portion
ugcuucauuuacaaggucgag

SEQ ID NO: 420 - RNA, 21 nt, Artificial Sequence
  SAMD9 targeting guide sequence portion
uguaaaugaagcaaaaguucu

SEQ ID NO: 421 - RNA, 21 nt, Artificial Sequence
  SAMD9 targeting guide sequence portion
uguuuucagcucgaccuugua

SEQ ID NO: 422 - RNA, 21 nt, Artificial Sequence
  SAMD9 targeting guide sequence portion
uucagcucgaccuuguaaaug

SEQ ID NO: 423 - RNA, 21 nt, Artificial Sequence
  SAMD9 targeting guide sequence portion
uucauuuacaaggucgagcug

SEQ ID NO: 424 - RNA, 21 nt, Artificial Sequence
  SAMD9 targeting guide sequence portion
uugcuucauuuacaaggucga

SEQ ID NO: 425 - RNA, 21 nt, Artificial Sequence
  SAMD9 targeting guide sequence portion
uuguaaaugaagcaaaaguuc

SEQ ID NO: 426 - RNA, 21 nt, Artificial Sequence
  SAMD9 targeting guide sequence portion
uuguuuucagcucgaccuugu

SEQ ID NO: 427 - RNA, 21 nt, Artificial Sequence
  SAMD9 targeting guide sequence portion
uuucagcucgaccuuguaaau

SEQ ID NO: 428 - RNA, 21 nt, Artificial Sequence
  SAMD9 targeting guide sequence portion
uuugcuucauuuacaaggucg

SEQ ID NO: 429 - RNA, 21 nt, Artificial Sequence
  SAMD9 targeting guide sequence portion
uuuucagcucgaccuuguaaa

SEQ ID NO: 430 - RNA, 21 nt, Artificial Sequence
  SAMD9 targeting guide sequence portion
uuuugcuucauuuacaagguc

SEQ ID NO: 431 - RNA, 22 nt, Artificial Sequence
  SAMD9 targeting guide sequence portion
aaaaaguccaagaacuuuugcu

SEQ ID NO: 432 - RNA, 22 nt, Artificial Sequence
  SAMD9 targeting guide sequence portion
aaaaguccaagaacuuuugcuu

SEQ ID NO: 433 - RNA, 22 nt, Artificial Sequence
  SAMD9 targeting guide sequence portion
aaaguccaagaacuuuugcuuc

SEQ ID NO: 434 - RNA, 22 nt, Artificial Sequence
  SAMD9 targeting guide sequence portion
aaaugaagcaaaaguucuugga

SEQ ID NO: 435 - RNA, 22 nt, Artificial Sequence
  SAMD9 targeting guide sequence portion
aacuuuugcuucauuuacaagg

SEQ ID NO: 436 - RNA, 22 nt, Artificial Sequence
  SAMD9 targeting guide sequence portion
aagaacuuuugcuucauuuaca

SEQ ID NO: 437 - RNA, 22 nt, Artificial Sequence
  SAMD9 targeting guide sequence portion
aaguccaagaacuuuugcuuca

SEQ ID NO: 438 - RNA, 22 nt, Artificial Sequence
  SAMD9 targeting guide sequence portion
aaugaagcaaaaguucuuggac

SEQ ID NO: 439 - RNA, 22 nt, Artificial Sequence
  SAMD9 targeting guide sequence portion
aauuguuuucagcucgaccuug

SEQ ID NO: 440 - RNA, 22 nt, Artificial Sequence
  SAMD9 targeting guide sequence portion
accuuguaaaugaagcaaaagu

SEQ ID NO: 441 - RNA, 22 nt, Artificial Sequence
  SAMD9 targeting guide sequence portion
acuuuugcuucauuuacaaggu

SEQ ID NO: 442 - RNA, 22 nt, Artificial Sequence
  SAMD9 targeting guide sequence portion
agaacuuuugcuucauuuacaa

SEQ ID NO: 443 - RNA, 22 nt, Artificial Sequence
  SAMD9 targeting guide sequence portion
agcucgaccuuguaaaugaagc

SEQ ID NO: 444 - RNA, 22 nt, Artificial Sequence
  SAMD9 targeting guide sequence portion
aggaaaaaguccaagaacuuuu

SEQ ID NO: 445 - RNA, 22 nt, Artificial Sequence
  SAMD9 targeting guide sequence portion
aguccaagaacuuuugcuucau

SEQ ID NO: 446 - RNA, 22 nt, Artificial Sequence
  SAMD9 targeting guide sequence portion
augaagcaaaaguucuuggacu

SEQ ID NO: 447 - RNA, 22 nt, Artificial Sequence
  SAMD9 targeting guide sequence portion
auuguuuucagcucgaccuugu

SEQ ID NO: 448 - RNA, 22 nt, Artificial Sequence
  SAMD9 targeting guide sequence portion
auuuacaaggucgagcugaaaa

SEQ ID NO: 449 - RNA, 22 nt, Artificial Sequence
  SAMD9 targeting guide sequence portion
caagaacuuuugcuucauuuac

SEQ ID NO: 450 - RNA, 22 nt, Artificial Sequence
  SAMD9 targeting guide sequence portion
caauuguuuucagcucgaccuu

SEQ ID NO: 451 - RNA, 22 nt, Artificial Sequence
  SAMD9 targeting guide sequence portion
cagcucgaccuuguaaaugaag

SEQ ID NO: 452 - RNA, 22 nt, Artificial Sequence
  SAMD9 targeting guide sequence portion
cauuuacaaggucgagcugaaa

SEQ ID NO: 453 - RNA, 22 nt, Artificial Sequence
  SAMD9 targeting guide sequence portion
ccaagaacuuuugcuucauuua

SEQ ID NO: 454 - RNA, 22 nt, Artificial Sequence
  SAMD9 targeting guide sequence portion
ccuuguaaaugaagcaaaaguu

SEQ ID NO: 455 - RNA, 22 nt, Artificial Sequence
  SAMD9 targeting guide sequence portion
cgaccuuguaaaugaagcaaaa

SEQ ID NO: 456 - RNA, 22 nt, Artificial Sequence
  SAMD9 targeting guide sequence portion
cucgaccuuguaaaugaagcaa

SEQ ID NO: 457 - RNA, 22 nt, Artificial Sequence
  SAMD9 targeting guide sequence portion
cuucauuuacaaggucgagcug

SEQ ID NO: 458 - RNA, 22 nt, Artificial Sequence
  SAMD9 targeting guide sequence portion
cuuguaaaugaagcaaaaguuc

SEQ ID NO: 459 - RNA, 22 nt, Artificial Sequence
  SAMD9 targeting guide sequence portion
cuuuugcuucauuuacaagguc

SEQ ID NO: 460 - RNA, 22 nt, Artificial Sequence
  SAMD9 targeting guide sequence portion
gaaaaaguccaagaacuuuugc

SEQ ID NO: 461 - RNA, 22 nt, Artificial Sequence
  SAMD9 targeting guide sequence portion
gaacuuuugcuucauuuacaag

SEQ ID NO: 462 - RNA, 22 nt, Artificial Sequence
  SAMD9 targeting guide sequence portion
gaccuuguaaaugaagcaaaag

SEQ ID NO: 463 - RNA, 22 nt, Artificial Sequence
  SAMD9 targeting guide sequence portion
gcucgaccuuguaaaugaagca

SEQ ID NO: 464 - RNA, 22 nt, Artificial Sequence
  SAMD9 targeting guide sequence portion
gcuucauuuacaaggucgagcu

SEQ ID NO: 465 - RNA, 22 nt, Artificial Sequence
  SAMD9 targeting guide sequence portion
ggaaaaaguccaagaacuuuug

SEQ ID NO: 466 - RNA, 22 nt, Artificial Sequence
  SAMD9 targeting guide sequence portion
guaaaugaagcaaaaguucuug

SEQ ID NO: 467 - RNA, 22 nt, Artificial Sequence
  SAMD9 targeting guide sequence portion
guccaagaacuuuugcuucauu

SEQ ID NO: 468 - RNA, 22 nt, Artificial Sequence
  SAMD9 targeting guide sequence portion
guuuucagcucgaccuuguaaa

SEQ ID NO: 469 - RNA, 22 nt, Artificial Sequence
  SAMD9 targeting guide sequence portion
uaaaugaagcaaaaguucuugg

SEQ ID NO: 470 - RNA, 22 nt, Artificial Sequence
  SAMD9 targeting guide sequence portion
ucagcucgaccuuguaaaugaa

SEQ ID NO: 471 - RNA, 22 nt, Artificial Sequence
  SAMD9 targeting guide sequence portion
ucauuuacaaggucgagcugaa

SEQ ID NO: 472 - RNA, 22 nt, Artificial Sequence
  SAMD9 targeting guide sequence portion
uccaagaacuuuugcuucauuu

SEQ ID NO: 473 - RNA, 22 nt, Artificial Sequence
  SAMD9 targeting guide sequence portion
ucgaccuuguaaaugaagcaaa

SEQ ID NO: 474 - RNA, 22 nt, Artificial Sequence
  SAMD9 targeting guide sequence portion
ugaagcaaaaguucuuggacuu

SEQ ID NO: 475 - RNA, 22 nt, Artificial Sequence
  SAMD9 targeting guide sequence portion
ugcuucauuuacaaggucgagc

SEQ ID NO: 476 - RNA, 22 nt, Artificial Sequence
  SAMD9 targeting guide sequence portion
uguaaaugaagcaaaaguucuu

SEQ ID NO: 477 - RNA, 22 nt, Artificial Sequence
  SAMD9 targeting guide sequence portion
uguuuucagcucgaccuuguaa

SEQ ID NO: 478 - RNA, 22 nt, Artificial Sequence
  SAMD9 targeting guide sequence portion
uucagcucgaccuuguaaauga

SEQ ID NO: 479 - RNA, 22 nt, Artificial Sequence
  SAMD9 targeting guide sequence portion
uucauuuacaaggucgagcuga

SEQ ID NO: 480 - RNA, 22 nt, Artificial Sequence
  SAMD9 targeting guide sequence portion
uugcuucauuuacaaggucgag

SEQ ID NO: 481 - RNA, 22 nt, Artificial Sequence
  SAMD9 targeting guide sequence portion
uuguaaaugaagcaaaaguucu

SEQ ID NO: 482 - RNA, 22 nt, Artificial Sequence
  SAMD9 targeting guide sequence portion
uuguuuucagcucgaccuugua

SEQ ID NO: 483 - RNA, 22 nt, Artificial Sequence
  SAMD9 targeting guide sequence portion
uuucagcucgaccuuguaaaug

SEQ ID NO: 484 - RNA, 22 nt, Artificial Sequence
  SAMD9 targeting guide sequence portion
uuugcuucauuuacaaggucga

SEQ ID NO: 485 - RNA, 22 nt, Artificial Sequence
  SAMD9 targeting guide sequence portion
uuuucagcucgaccuuguaaau

SEQ ID NO: 486 - RNA, 22 nt, Artificial Sequence
  SAMD9 targeting guide sequence portion
uuuugcuucauuuacaaggucg

SEQ ID NO: 487 - RNA, 20 nt, Artificial Sequence
  SAMD9 targeting guide sequence portion
aaaaguucuuggacuuuuuc

SEQ ID NO: 488 - RNA, 20 nt, Artificial Sequence
  SAMD9 targeting guide sequence portion
aaaguucuuggacuuuuucc

SEQ ID NO: 489 - RNA, 20 nt, Artificial Sequence
  SAMD9 targeting guide sequence portion
aaguaggaaaaaguccaaga

SEQ ID NO: 490 - RNA, 20 nt, Artificial Sequence
  SAMD9 targeting guide sequence portion
aaguucuuggacuuuuuccu

SEQ ID NO: 491 - RNA, 20 nt, Artificial Sequence
  SAMD9 targeting guide sequence portion
acuuccacacaucuccacuc

SEQ ID NO: 492 - RNA, 20 nt, Artificial Sequence
  SAMD9 targeting guide sequence portion
acuuuuuccuacuuccacac

SEQ ID NO: 493 - RNA, 20 nt, Artificial Sequence
  SAMD9 targeting guide sequence portion
agaguggagauguguggaag

SEQ ID NO: 494 - RNA, 20 nt, Artificial Sequence
  SAMD9 targeting guide sequence portion
agauguguggaaguaggaaa

SEQ ID NO: 495 - RNA, 20 nt, Artificial Sequence
  SAMD9 targeting guide sequence portion
agcaaaaguucuuggacuuu

SEQ ID NO: 496 - RNA, 20 nt, Artificial Sequence
  SAMD9 targeting guide sequence portion
aguaggaaaaaguccaagaa

SEQ ID NO: 497 - RNA, 20 nt, Artificial Sequence
  SAMD9 targeting guide sequence portion
aguggagauguguggaagua

SEQ ID NO: 498 - RNA, 20 nt, Artificial Sequence
  SAMD9 targeting guide sequence portion
aguucuuggacuuuuuccua

SEQ ID NO: 499 - RNA, 20 nt, Artificial Sequence
  SAMD9 targeting guide sequence portion
auguguggaaguaggaaaaa

SEQ ID NO: 500 - RNA, 20 nt, Artificial Sequence
  SAMD9 targeting guide sequence portion
caaaaguucuuggacuuuuu

SEQ ID NO: 501 - RNA, 20 nt, Artificial Sequence
  SAMD9 targeting guide sequence portion
cagaguggagauguguggaa

SEQ ID NO: 502 - RNA, 20 nt, Artificial Sequence
  SAMD9 targeting guide sequence portion
ccuacuuccacacaucucca

SEQ ID NO: 503 - RNA, 20 nt, Artificial Sequence
  SAMD9 targeting guide sequence portion
cuacuuccacacaucuccac

SEQ ID NO: 504 - RNA, 20 nt, Artificial Sequence
  SAMD9 targeting guide sequence portion
cuuggacuuuuuccuacuuc

SEQ ID NO: 505 - RNA, 20 nt, Artificial Sequence
  SAMD9 targeting guide sequence portion
cuuuuuccuacuuccacaca

SEQ ID NO: 506 - RNA, 20 nt, Artificial Sequence
  SAMD9 targeting guide sequence portion
gaaguaggaaaaaguccaag

SEQ ID NO: 507 - RNA, 20 nt, Artificial Sequence
  SAMD9 targeting guide sequence portion
gacuuuuuccuacuuccaca

SEQ ID NO: 508 - RNA, 20 nt, Artificial Sequence
  SAMD9 targeting guide sequence portion
gagauguguggaaguaggaa

SEQ ID NO: 509 - RNA, 20 nt, Artificial Sequence
  SAMD9 targeting guide sequence portion
gaguggagauguguggaagu

SEQ ID NO: 510 - RNA, 20 nt, Artificial Sequence
  SAMD9 targeting guide sequence portion
gauguguggaaguaggaaaa

SEQ ID NO: 511 - RNA, 20 nt, Artificial Sequence
  SAMD9 targeting guide sequence portion
gcaaaaguucuuggacuuuu

SEQ ID NO: 512 - RNA, 20 nt, Artificial Sequence
  SAMD9 targeting guide sequence portion
gcagaguggagaugugugga

SEQ ID NO: 513 - RNA, 20 nt, Artificial Sequence
  SAMD9 targeting guide sequence portion
ggaaguaggaaaaaguccaa

SEQ ID NO: 514 - RNA, 20 nt, Artificial Sequence
  SAMD9 targeting guide sequence portion
ggacuuuuuccuacuuccac

SEQ ID NO: 515 - RNA, 20 nt, Artificial Sequence
  SAMD9 targeting guide sequence portion
ggagauguguggaaguagga

SEQ ID NO: 516 - RNA, 20 nt, Artificial Sequence
  SAMD9 targeting guide sequence portion
ggcagaguggagaugugugg

SEQ ID NO: 517 - RNA, 20 nt, Artificial Sequence
  SAMD9 targeting guide sequence portion
guaggaaaaaguccaagaac

SEQ ID NO: 518 - RNA, 20 nt, Artificial Sequence
  SAMD9 targeting guide sequence portion
guggaaguaggaaaaagucc

SEQ ID NO: 519 - RNA, 20 nt, Artificial Sequence
  SAMD9 targeting guide sequence portion
guggagauguguggaaguag

SEQ ID NO: 520 - RNA, 20 nt, Artificial Sequence
  SAMD9 targeting guide sequence portion
guggcagaguggagaugugu

SEQ ID NO: 521 - RNA, 20 nt, Artificial Sequence
  SAMD9 targeting guide sequence portion
guguggaaguaggaaaaagu

SEQ ID NO: 522 - RNA, 20 nt, Artificial Sequence
  SAMD9 targeting guide sequence portion
guucuuggacuuuuuccuac

SEQ ID NO: 523 - RNA, 20 nt, Artificial Sequence
  SAMD9 targeting guide sequence portion
uacuuccacacaucuccacu

SEQ ID NO: 524 - RNA, 20 nt, Artificial Sequence
  SAMD9 targeting guide sequence portion
uaggaaaaaguccaagaacu

SEQ ID NO: 525 - RNA, 20 nt, Artificial Sequence
  SAMD9 targeting guide sequence portion
uccuacuuccacacaucucc

SEQ ID NO: 526 - RNA, 20 nt, Artificial Sequence
  SAMD9 targeting guide sequence portion
ucuuggacuuuuuccuacuu

SEQ ID NO: 527 - RNA, 20 nt, Artificial Sequence
  SAMD9 targeting guide sequence portion
uggaaguaggaaaaagucca

SEQ ID NO: 528 - RNA, 20 nt, Artificial Sequence
  SAMD9 targeting guide sequence portion
uggacuuuuuccuacuucca

SEQ ID NO: 529 - RNA, 20 nt, Artificial Sequence
  SAMD9 targeting guide sequence portion
uggagauguguggaaguagg

SEQ ID NO: 530 - RNA, 20 nt, Artificial Sequence
  SAMD9 targeting guide sequence portion
uggcagaguggagaugugug

SEQ ID NO: 531 - RNA, 20 nt, Artificial Sequence
  SAMD9 targeting guide sequence portion
uguggaaguaggaaaaaguc

SEQ ID NO: 532 - RNA, 20 nt, Artificial Sequence
  SAMD9 targeting guide sequence portion
uguguggaaguaggaaaaag

SEQ ID NO: 533 - RNA, 20 nt, Artificial Sequence
  SAMD9 targeting guide sequence portion
uuccuacuuccacacaucuc

SEQ ID NO: 534 - RNA, 20 nt, Artificial Sequence
  SAMD9 targeting guide sequence portion
uucuuggacuuuuuccuacu

SEQ ID NO: 535 - RNA, 20 nt, Artificial Sequence
  SAMD9 targeting guide sequence portion
uuggacuuuuuccuacuucc

SEQ ID NO: 536 - RNA, 20 nt, Artificial Sequence
  SAMD9 targeting guide sequence portion
uuuccuacuuccacacaucu

SEQ ID NO: 537 - RNA, 20 nt, Artificial Sequence
  SAMD9 targeting guide sequence portion
uuuuccuacuuccacacauc

SEQ ID NO: 538 - RNA, 20 nt, Artificial Sequence
  SAMD9 targeting guide sequence portion
uuuuuccuacuuccacacau

SEQ ID NO: 539 - RNA, 21 nt, Artificial Sequence
  SAMD9 targeting guide sequence portion
aaaaguucuuggacuuuuucc

SEQ ID NO: 540 - RNA, 21 nt, Artificial Sequence
  SAMD9 targeting guide sequence portion
aaaguucuuggacuuuuuccu

SEQ ID NO: 541 - RNA, 21 nt, Artificial Sequence
  SAMD9 targeting guide sequence portion
aagcaaaaguucuuggacuuu

SEQ ID NO: 542 - RNA, 21 nt, Artificial Sequence
  SAMD9 targeting guide sequence portion
aaguaggaaaaaguccaagaa

SEQ ID NO: 543 - RNA, 21 nt, Artificial Sequence
  SAMD9 targeting guide sequence portion
aaguucuuggacuuuuuccua

SEQ ID NO: 544 - RNA, 21 nt, Artificial Sequence
  SAMD9 targeting guide sequence portion
acuuccacacaucuccacucu

SEQ ID NO: 545 - RNA, 21 nt, Artificial Sequence
  SAMD9 targeting guide sequence portion
acuuuuuccuacuuccacaca

SEQ ID NO: 546 - RNA, 21 nt, Artificial Sequence
  SAMD9 targeting guide sequence portion
agaguggagauguguggaagu

SEQ ID NO: 547 - RNA, 21 nt, Artificial Sequence
  SAMD9 targeting guide sequence portion
agauguguggaaguaggaaaa

SEQ ID NO: 548 - RNA, 21 nt, Artificial Sequence
  SAMD9 targeting guide sequence portion
agcaaaaguucuuggacuuuu

SEQ ID NO: 549 - RNA, 21 nt, Artificial Sequence
  SAMD9 targeting guide sequence portion
aguaggaaaaaguccaagaac

SEQ ID NO: 550 - RNA, 21 nt, Artificial Sequence
  SAMD9 targeting guide sequence portion
aguggagauguguggaaguag

SEQ ID NO: 551 - RNA, 21 nt, Artificial Sequence
  SAMD9 targeting guide sequence portion
aguucuuggacuuuuuccuac

SEQ ID NO: 552 - RNA, 21 nt, Artificial Sequence
  SAMD9 targeting guide sequence portion
auguguggaaguaggaaaaag

SEQ ID NO: 553 - RNA, 21 nt, Artificial Sequence
  SAMD9 targeting guide sequence portion
caaaaguucuuggacuuuuuc

SEQ ID NO: 554 - RNA, 21 nt, Artificial Sequence
  SAMD9 targeting guide sequence portion
cagaguggagauguguggaag

SEQ ID NO: 555 - RNA, 21 nt, Artificial Sequence
  SAMD9 targeting guide sequence portion
ccuacuuccacacaucuccac

SEQ ID NO: 556 - RNA, 21 nt, Artificial Sequence
  SAMD9 targeting guide sequence portion
cuacuuccacacaucuccacu

SEQ ID NO: 557 - RNA, 21 nt, Artificial Sequence
  SAMD9 targeting guide sequence portion
cuuggacuuuuuccuacuucc

SEQ ID NO: 558 - RNA, 21 nt, Artificial Sequence
  SAMD9 targeting guide sequence portion
cuuuuuccuacuuccacacau

SEQ ID NO: 559 - RNA, 21 nt, Artificial Sequence
  SAMD9 targeting guide sequence portion
gaaguaggaaaaaguccaaga

SEQ ID NO: 560 - RNA, 21 nt, Artificial Sequence
  SAMD9 targeting guide sequence portion
gacuuuuuccuacuuccacac

SEQ ID NO: 561 - RNA, 21 nt, Artificial Sequence
  SAMD9 targeting guide sequence portion
gagauguguggaaguaggaaa

SEQ ID NO: 562 - RNA, 21 nt, Artificial Sequence
  SAMD9 targeting guide sequence portion
gaguggagauguguggaagua

SEQ ID NO: 563 - RNA, 21 nt, Artificial Sequence
  SAMD9 targeting guide sequence portion
gauguguggaaguaggaaaaa

SEQ ID NO: 564 - RNA, 21 nt, Artificial Sequence
  SAMD9 targeting guide sequence portion
gcaaaaguucuuggacuuuuu

SEQ ID NO: 565 - RNA, 21 nt, Artificial Sequence
  SAMD9 targeting guide sequence portion
gcagaguggagauguguggaa

SEQ ID NO: 566 - RNA, 21 nt, Artificial Sequence
  SAMD9 targeting guide sequence portion
ggaaguaggaaaaaguccaag

SEQ ID NO: 567 - RNA, 21 nt, Artificial Sequence
  SAMD9 targeting guide sequence portion
ggacuuuuuccuacuuccaca

SEQ ID NO: 568 - RNA, 21 nt, Artificial Sequence
  SAMD9 targeting guide sequence portion
ggagauguguggaaguaggaa

SEQ ID NO: 569 - RNA, 21 nt, Artificial Sequence
  SAMD9 targeting guide sequence portion
ggcagaguggagaugugugga

SEQ ID NO: 570 - RNA, 21 nt, Artificial Sequence
  SAMD9 targeting guide sequence portion
guaggaaaaaguccaagaacu

SEQ ID NO: 571 - RNA, 21 nt, Artificial Sequence
  SAMD9 targeting guide sequence portion
guggaaguaggaaaaagucca

SEQ ID NO: 572 - RNA, 21 nt, Artificial Sequence
  SAMD9 targeting guide sequence portion
guggagauguguggaaguagg

SEQ ID NO: 573 - RNA, 21 nt, Artificial Sequence
  SAMD9 targeting guide sequence portion
guggcagaguggagaugugug

SEQ ID NO: 574 - RNA, 21 nt, Artificial Sequence
  SAMD9 targeting guide sequence portion
guguggaaguaggaaaaaguc

SEQ ID NO: 575 - RNA, 21 nt, Artificial Sequence
  SAMD9 targeting guide sequence portion
guucuuggacuuuuuccuacu

SEQ ID NO: 576 - RNA, 21 nt, Artificial Sequence
  SAMD9 targeting guide sequence portion
uacuuccacacaucuccacuc

SEQ ID NO: 577 - RNA, 21 nt, Artificial Sequence
  SAMD9 targeting guide sequence portion
uaggaaaaaguccaagaacuu

SEQ ID NO: 578 - RNA, 21 nt, Artificial Sequence
  SAMD9 targeting guide sequence portion
uccuacuuccacacaucucca

SEQ ID NO: 579 - RNA, 21 nt, Artificial Sequence
  SAMD9 targeting guide sequence portion
ucuuggacuuuuuccuacuuc

SEQ ID NO: 580 - RNA, 21 nt, Artificial Sequence
  SAMD9 targeting guide sequence portion
uggaaguaggaaaaaguccaa

SEQ ID NO: 581 - RNA, 21 nt, Artificial Sequence
  SAMD9 targeting guide sequence portion
uggacuuuuuccuacuuccac

SEQ ID NO: 582 - RNA, 21 nt, Artificial Sequence
  SAMD9 targeting guide sequence portion
uggagauguguggaaguagga

SEQ ID NO: 583 - RNA, 21 nt, Artificial Sequence
  SAMD9 targeting guide sequence portion
uggcagaguggagaugugugg

SEQ ID NO: 584 - RNA, 21 nt, Artificial Sequence
  SAMD9 targeting guide sequence portion
uguggaaguaggaaaaagucc

SEQ ID NO: 585 - RNA, 21 nt, Artificial Sequence
  SAMD9 targeting guide sequence portion
uguggcagaguggagaugugu

SEQ ID NO: 586 - RNA, 21 nt, Artificial Sequence
  SAMD9 targeting guide sequence portion
uguguggaaguaggaaaaagu

SEQ ID NO: 587 - RNA, 21 nt, Artificial Sequence
  SAMD9 targeting guide sequence portion
uuccuacuuccacacaucucc

SEQ ID NO: 588 - RNA, 21 nt, Artificial Sequence
  SAMD9 targeting guide sequence portion
uucuuggacuuuuuccuacuu

SEQ ID NO: 589 - RNA, 21 nt, Artificial Sequence
  SAMD9 targeting guide sequence portion
uuggacuuuuuccuacuucca

SEQ ID NO: 590 - RNA, 21 nt, Artificial Sequence
  SAMD9 targeting guide sequence portion
uuuccuacuuccacacaucuc

SEQ ID NO: 591 - RNA, 21 nt, Artificial Sequence
  SAMD9 targeting guide sequence portion
uuuuccuacuuccacacaucu

SEQ ID NO: 592 - RNA, 21 nt, Artificial Sequence
  SAMD9 targeting guide sequence portion
uuuuuccuacuuccacacauc

SEQ ID NO: 593 - RNA, 22 nt, Artificial Sequence
  SAMD9 targeting guide sequence portion
aaaaguucuuggacuuuuuccu

SEQ ID NO: 594 - RNA, 22 nt, Artificial Sequence
  SAMD9 targeting guide sequence portion
aaaguucuuggacuuuuuccua

SEQ ID NO: 595 - RNA, 22 nt, Artificial Sequence
  SAMD9 targeting guide sequence portion
aagcaaaaguucuuggacuuuu

SEQ ID NO: 596 - RNA, 22 nt, Artificial Sequence
  SAMD9 targeting guide sequence portion
aaguaggaaaaaguccaagaac

SEQ ID NO: 597 - RNA, 22 nt, Artificial Sequence
  SAMD9 targeting guide sequence portion
aaguucuuggacuuuuuccuac

SEQ ID NO: 598 - RNA, 22 nt, Artificial Sequence
  SAMD9 targeting guide sequence portion
acuuccacacaucuccacucug

SEQ ID NO: 599 - RNA, 22 nt, Artificial Sequence
  SAMD9 targeting guide sequence portion
acuuuuuccuacuuccacacau

SEQ ID NO: 600 - RNA, 22 nt, Artificial Sequence
  SAMD9 targeting guide sequence portion
agaguggagauguguggaagua

SEQ ID NO: 601 - RNA, 22 nt, Artificial Sequence
  SAMD9 targeting guide sequence portion
agauguguggaaguaggaaaaa

SEQ ID NO: 602 - RNA, 22 nt, Artificial Sequence
  SAMD9 targeting guide sequence portion
agcaaaaguucuuggacuuuuu

SEQ ID NO: 603 - RNA, 22 nt, Artificial Sequence
  SAMD9 targeting guide sequence portion
aguaggaaaaaguccaagaacu

SEQ ID NO: 604 - RNA, 22 nt, Artificial Sequence
  SAMD9 targeting guide sequence portion
aguggagauguguggaaguagg

SEQ ID NO: 605 - RNA, 22 nt, Artificial Sequence
  SAMD9 targeting guide sequence portion
aguucuuggacuuuuuccuacu

SEQ ID NO: 606 - RNA, 22 nt, Artificial Sequence
  SAMD9 targeting guide sequence portion
auguguggaaguaggaaaaagu

SEQ ID NO: 607 - RNA, 22 nt, Artificial Sequence
  SAMD9 targeting guide sequence portion
caaaaguucuuggacuuuuucc

SEQ ID NO: 608 - RNA, 22 nt, Artificial Sequence
  SAMD9 targeting guide sequence portion
cagaguggagauguguggaagu

SEQ ID NO: 609 - RNA, 22 nt, Artificial Sequence
  SAMD9 targeting guide sequence portion
ccuacuuccacacaucuccacu

SEQ ID NO: 610 - RNA, 22 nt, Artificial Sequence
  SAMD9 targeting guide sequence portion
cuacuuccacacaucuccacuc

SEQ ID NO: 611 - RNA, 22 nt, Artificial Sequence
  SAMD9 targeting guide sequence portion
cuuggacuuuuuccuacuucca

SEQ ID NO: 612 - RNA, 22 nt, Artificial Sequence
  SAMD9 targeting guide sequence portion
cuuuuuccuacuuccacacauc

SEQ ID NO: 613 - RNA, 22 nt, Artificial Sequence
  SAMD9 targeting guide sequence portion
gaagcaaaaguucuuggacuuu

SEQ ID NO: 614 - RNA, 22 nt, Artificial Sequence
  SAMD9 targeting guide sequence portion
gaaguaggaaaaaguccaagaa

SEQ ID NO: 615 - RNA, 22 nt, Artificial Sequence
  SAMD9 targeting guide sequence portion
gacuuuuuccuacuuccacaca

SEQ ID NO: 616 - RNA, 22 nt, Artificial Sequence
  SAMD9 targeting guide sequence portion
gagauguguggaaguaggaaaa

SEQ ID NO: 617 - RNA, 22 nt, Artificial Sequence
  SAMD9 targeting guide sequence portion
gaguggagauguguggaaguag

SEQ ID NO: 618 - RNA, 22 nt, Artificial Sequence
  SAMD9 targeting guide sequence portion
gauguguggaaguaggaaaaag

SEQ ID NO: 619 - RNA, 22 nt, Artificial Sequence
  SAMD9 targeting guide sequence portion
gcaaaaguucuuggacuuuuuc

SEQ ID NO: 620 - RNA, 22 nt, Artificial Sequence
  SAMD9 targeting guide sequence portion
gcagaguggagauguguggaag

SEQ ID NO: 621 - RNA, 22 nt, Artificial Sequence
  SAMD9 targeting guide sequence portion
ggaaguaggaaaaaguccaaga

SEQ ID NO: 622 - RNA, 22 nt, Artificial Sequence
  SAMD9 targeting guide sequence portion
ggacuuuuuccuacuuccacac

SEQ ID NO: 623 - RNA, 22 nt, Artificial Sequence
  SAMD9 targeting guide sequence portion
ggagauguguggaaguaggaaa

SEQ ID NO: 624 - RNA, 22 nt, Artificial Sequence
  SAMD9 targeting guide sequence portion
ggcagaguggagauguguggaa

SEQ ID NO: 625 - RNA, 22 nt, Artificial Sequence
  SAMD9 targeting guide sequence portion
guaggaaaaaguccaagaacuu

SEQ ID NO: 626 - RNA, 22 nt, Artificial Sequence
  SAMD9 targeting guide sequence portion
guggaaguaggaaaaaguccaa

SEQ ID NO: 627 - RNA, 22 nt, Artificial Sequence
  SAMD9 targeting guide sequence portion
guggagauguguggaaguagga

SEQ ID NO: 628 - RNA, 22 nt, Artificial Sequence
  SAMD9 targeting guide sequence portion
guggcagaguggagaugugugg

SEQ ID NO: 629 - RNA, 22 nt, Artificial Sequence
  SAMD9 targeting guide sequence portion
guguggaaguaggaaaaagucc

SEQ ID NO: 630 - RNA, 22 nt, Artificial Sequence
  SAMD9 targeting guide sequence portion
guucuuggacuuuuuccuacuu

SEQ ID NO: 631 - RNA, 22 nt, Artificial Sequence
  SAMD9 targeting guide sequence portion
uacuuccacacaucuccacucu

SEQ ID NO: 632 - RNA, 22 nt, Artificial Sequence
  SAMD9 targeting guide sequence portion
uaggaaaaaguccaagaacuuu

SEQ ID NO: 633 - RNA, 22 nt, Artificial Sequence
  SAMD9 targeting guide sequence portion
uccuacuuccacacaucuccac

SEQ ID NO: 634 - RNA, 22 nt, Artificial Sequence
  SAMD9 targeting guide sequence portion
ucuuggacuuuuuccuacuucc

SEQ ID NO: 635 - RNA, 22 nt, Artificial Sequence
  SAMD9 targeting guide sequence portion
uggaaguaggaaaaaguccaag

SEQ ID NO: 636 - RNA, 22 nt, Artificial Sequence
  SAMD9 targeting guide sequence portion
uggacuuuuuccuacuuccaca

SEQ ID NO: 637 - RNA, 22 nt, Artificial Sequence
  SAMD9 targeting guide sequence portion
uggagauguguggaaguaggaa

SEQ ID NO: 638 - RNA, 22 nt, Artificial Sequence
  SAMD9 targeting guide sequence portion
uggcagaguggagaugugugga

SEQ ID NO: 639 - RNA, 22 nt, Artificial Sequence
  SAMD9 targeting guide sequence portion
uguggaaguaggaaaaagucca

SEQ ID NO: 640 - RNA, 22 nt, Artificial Sequence
  SAMD9 targeting guide sequence portion
uguggcagaguggagaugugug

SEQ ID NO: 641 - RNA, 22 nt, Artificial Sequence
  SAMD9 targeting guide sequence portion
uguguggaaguaggaaaaaguc

SEQ ID NO: 642 - RNA, 22 nt, Artificial Sequence
  SAMD9 targeting guide sequence portion
uuccuacuuccacacaucucca

SEQ ID NO: 643 - RNA, 22 nt, Artificial Sequence
  SAMD9 targeting guide sequence portion
uucuuggacuuuuuccuacuuc

SEQ ID NO: 644 - RNA, 22 nt, Artificial Sequence
  SAMD9 targeting guide sequence portion
uuggacuuuuuccuacuuccac

SEQ ID NO: 645 - RNA, 22 nt, Artificial Sequence
  SAMD9 targeting guide sequence portion
uuguggcagaguggagaugugu

SEQ ID NO: 646 - RNA, 22 nt, Artificial Sequence
  SAMD9 targeting guide sequence portion
uuuccuacuuccacacaucucc

SEQ ID NO: 647 - RNA, 22 nt, Artificial Sequence
  SAMD9 targeting guide sequence portion
uuuuccuacuuccacacaucuc

SEQ ID NO: 648 - RNA, 22 nt, Artificial Sequence
  SAMD9 targeting guide sequence portion
uuuuuccuacuuccacacaucu

SEQ ID NO: 649 - RNA, 20 nt, Artificial Sequence
  SAMD9 targeting guide sequence portion
aaaagacuggaaagacuugu

SEQ ID NO: 650 - RNA, 20 nt, Artificial Sequence
  SAMD9 targeting guide sequence portion
aaagacuggaaagacuuguu

SEQ ID NO: 651 - RNA, 20 nt, Artificial Sequence
  SAMD9 targeting guide sequence portion
aaagacuuguucacgaagga

SEQ ID NO: 652 - RNA, 20 nt, Artificial Sequence
  SAMD9 targeting guide sequence portion
aaagcacuggucaauuuuuc

SEQ ID NO: 653 - RNA, 20 nt, Artificial Sequence
  SAMD9 targeting guide sequence portion
aagacuggaaagacuuguuc

SEQ ID NO: 654 - RNA, 20 nt, Artificial Sequence
  SAMD9 targeting guide sequence portion
aagacuuguucacgaaggaa

SEQ ID NO: 655 - RNA, 20 nt, Artificial Sequence
  SAMD9 targeting guide sequence portion
aagcacuggucaauuuuucc

SEQ ID NO: 656 - RNA, 20 nt, Artificial Sequence
  SAMD9 targeting guide sequence portion
aauuuuuccuucgugaacaa

SEQ ID NO: 657 - RNA, 20 nt, Artificial Sequence
  SAMD9 targeting guide sequence portion
acgaaggaaaaauugaccag

SEQ ID NO: 658 - RNA, 20 nt, Artificial Sequence
  SAMD9 targeting guide sequence portion
acuggaaagacuuguucacg

SEQ ID NO: 659 - RNA, 20 nt, Artificial Sequence
  SAMD9 targeting guide sequence portion
acuggucaauuuuuccuucg

SEQ ID NO: 660 - RNA, 20 nt, Artificial Sequence
  SAMD9 targeting guide sequence portion
acuuguucacgaaggaaaaa

SEQ ID NO: 661 - RNA, 20 nt, Artificial Sequence
  SAMD9 targeting guide sequence portion
agacuggaaagacuuguuca

SEQ ID NO: 662 - RNA, 20 nt, Artificial Sequence
  SAMD9 targeting guide sequence portion
agacuuguucacgaaggaaa

SEQ ID NO: 663 - RNA, 20 nt, Artificial Sequence
  SAMD9 targeting guide sequence portion
agcacuggucaauuuuuccu

SEQ ID NO: 664 - RNA, 20 nt, Artificial Sequence
  SAMD9 targeting guide sequence portion
auuuuuccuucgugaacaag

SEQ ID NO: 665 - RNA, 20 nt, Artificial Sequence
  SAMD9 targeting guide sequence portion
caauuuuuccuucgugaaca

SEQ ID NO: 666 - RNA, 20 nt, Artificial Sequence
  SAMD9 targeting guide sequence portion
cacgaaggaaaaauugacca

SEQ ID NO: 667 - RNA, 20 nt, Artificial Sequence
  SAMD9 targeting guide sequence portion
cacuggucaauuuuuccuuc

SEQ ID NO: 668 - RNA, 20 nt, Artificial Sequence
  SAMD9 targeting guide sequence portion
ccuucgugaacaagucuuuc

SEQ ID NO: 669 - RNA, 20 nt, Artificial Sequence
  SAMD9 targeting guide sequence portion
cgaaggaaaaauugaccagu

SEQ ID NO: 670 - RNA, 20 nt, Artificial Sequence
  SAMD9 targeting guide sequence portion
cgugaacaagucuuuccagu

SEQ ID NO: 671 - RNA, 20 nt, Artificial Sequence
  SAMD9 targeting guide sequence portion
cuggaaagacuuguucacga

SEQ ID NO: 672 - RNA, 20 nt, Artificial Sequence
  SAMD9 targeting guide sequence portion
cuggucaauuuuuccuucgu

SEQ ID NO: 673 - RNA, 20 nt, Artificial Sequence
  SAMD9 targeting guide sequence portion
cuucgugaacaagucuuucc

SEQ ID NO: 674 - RNA, 20 nt, Artificial Sequence
  SAMD9 targeting guide sequence portion
cuuguucacgaaggaaaaau

SEQ ID NO: 675 - RNA, 20 nt, Artificial Sequence
  SAMD9 targeting guide sequence portion
gaaagacuuguucacgaagg

SEQ ID NO: 676 - RNA, 20 nt, Artificial Sequence
  SAMD9 targeting guide sequence portion
gaaggaaaaauugaccagug

SEQ ID NO: 677 - RNA, 20 nt, Artificial Sequence
  SAMD9 targeting guide sequence portion
gacuggaaagacuuguucac

SEQ ID NO: 678 - RNA, 20 nt, Artificial Sequence
  SAMD9 targeting guide sequence portion
gacuuguucacgaaggaaaa

SEQ ID NO: 679 - RNA, 20 nt, Artificial Sequence
  SAMD9 targeting guide sequence portion
gcacuggucaauuuuuccuu

SEQ ID NO: 680 - RNA, 20 nt, Artificial Sequence
  SAMD9 targeting guide sequence portion
ggaaagacuuguucacgaag

SEQ ID NO: 681 - RNA, 20 nt, Artificial Sequence
  SAMD9 targeting guide sequence portion
ggucaauuuuuccuucguga

SEQ ID NO: 682 - RNA, 20 nt, Artificial Sequence
  SAMD9 targeting guide sequence portion
gucaauuuuuccuucgugaa

SEQ ID NO: 683 - RNA, 20 nt, Artificial Sequence
  SAMD9 targeting guide sequence portion
guucacgaaggaaaaauuga

SEQ ID NO: 684 - RNA, 20 nt, Artificial Sequence
  SAMD9 targeting guide sequence portion
uaaaagacuggaaagacuug

SEQ ID NO: 685 - RNA, 20 nt, Artificial Sequence
  SAMD9 targeting guide sequence portion
uaaagcacuggucaauuuuu

SEQ ID NO: 686 - RNA, 20 nt, Artificial Sequence
  SAMD9 targeting guide sequence portion
ucaauuuuuccuucgugaac

SEQ ID NO: 687 - RNA, 20 nt, Artificial Sequence
  SAMD9 targeting guide sequence portion
ucacgaaggaaaaauugacc

SEQ ID NO: 688 - RNA, 20 nt, Artificial Sequence
  SAMD9 targeting guide sequence portion
uccuucgugaacaagucuuu

SEQ ID NO: 689 - RNA, 20 nt, Artificial Sequence
  SAMD9 targeting guide sequence portion
ucgugaacaagucuuuccag

SEQ ID NO: 690 - RNA, 20 nt, Artificial Sequence
  SAMD9 targeting guide sequence portion
uggaaagacuuguucacgaa

SEQ ID NO: 691 - RNA, 20 nt, Artificial Sequence
  SAMD9 targeting guide sequence portion
uggucaauuuuuccuucgug

SEQ ID NO: 692 - RNA, 20 nt, Artificial Sequence
  SAMD9 targeting guide sequence portion
uguucacgaaggaaaaauug

SEQ ID NO: 693 - RNA, 20 nt, Artificial Sequence
  SAMD9 targeting guide sequence portion
uuaaagcacuggucaauuuu

SEQ ID NO: 694 - RNA, 20 nt, Artificial Sequence
  SAMD9 targeting guide sequence portion
uucacgaaggaaaaauugac

SEQ ID NO: 695 - RNA, 20 nt, Artificial Sequence
  SAMD9 targeting guide sequence portion
uuccuucgugaacaagucuu

SEQ ID NO: 696 - RNA, 20 nt, Artificial Sequence
  SAMD9 targeting guide sequence portion
uucgugaacaagucuuucca

SEQ ID NO: 697 - RNA, 20 nt, Artificial Sequence
  SAMD9 targeting guide sequence portion
uuguucacgaaggaaaaauu

SEQ ID NO: 698 - RNA, 20 nt, Artificial Sequence
  SAMD9 targeting guide sequence portion
uuuccuucgugaacaagucu

SEQ ID NO: 699 - RNA, 20 nt, Artificial Sequence
  SAMD9 targeting guide sequence portion
uuuuccuucgugaacaaguc

SEQ ID NO: 700 - RNA, 20 nt, Artificial Sequence
  SAMD9 targeting guide sequence portion
uuuuuccuucgugaacaagu

SEQ ID NO: 701 - RNA, 21 nt, Artificial Sequence
  SAMD9 targeting guide sequence portion
aaaagacuggaaagacuuguu

SEQ ID NO: 702 - RNA, 21 nt, Artificial Sequence
  SAMD9 targeting guide sequence portion
aaagacuggaaagacuuguuc

SEQ ID NO: 703 - RNA, 21 nt, Artificial Sequence
  SAMD9 targeting guide sequence portion
aaagacuuguucacgaaggaa

SEQ ID NO: 704 - RNA, 21 nt, Artificial Sequence
  SAMD9 targeting guide sequence portion
aaagcacuggucaauuuuucc

SEQ ID NO: 705 - RNA, 21 nt, Artificial Sequence
  SAMD9 targeting guide sequence portion
aagacuggaaagacuuguuca

SEQ ID NO: 706 - RNA, 21 nt, Artificial Sequence
  SAMD9 targeting guide sequence portion
aagacuuguucacgaaggaaa

SEQ ID NO: 707 - RNA, 21 nt, Artificial Sequence
  SAMD9 targeting guide sequence portion
aagcacuggucaauuuuuccu

SEQ ID NO: 708 - RNA, 21 nt, Artificial Sequence
  SAMD9 targeting guide sequence portion
aauuuuuccuucgugaacaag

SEQ ID NO: 709 - RNA, 21 nt, Artificial Sequence
  SAMD9 targeting guide sequence portion
acgaaggaaaaauugaccagu

SEQ ID NO: 710 - RNA, 21 nt, Artificial Sequence
  SAMD9 targeting guide sequence portion
acuggaaagacuuguucacga

SEQ ID NO: 711 - RNA, 21 nt, Artificial Sequence
  SAMD9 targeting guide sequence portion
acuggucaauuuuuccuucgu

SEQ ID NO: 712 - RNA, 21 nt, Artificial Sequence
  SAMD9 targeting guide sequence portion
acuuguucacgaaggaaaaau

SEQ ID NO: 713 - RNA, 21 nt, Artificial Sequence
  SAMD9 targeting guide sequence portion
agacuggaaagacuuguucac

SEQ ID NO: 714 - RNA, 21 nt, Artificial Sequence
  SAMD9 targeting guide sequence portion
agacuuguucacgaaggaaaa

SEQ ID NO: 715 - RNA, 21 nt, Artificial Sequence
  SAMD9 targeting guide sequence portion
agcacuggucaauuuuuccuu

SEQ ID NO: 716 - RNA, 21 nt, Artificial Sequence
  SAMD9 targeting guide sequence portion
auuuuuccuucgugaacaagu

SEQ ID NO: 717 - RNA, 21 nt, Artificial Sequence
  SAMD9 targeting guide sequence portion
caauuuuuccuucgugaacaa

SEQ ID NO: 718 - RNA, 21 nt, Artificial Sequence
  SAMD9 targeting guide sequence portion
cacgaaggaaaaauugaccag

SEQ ID NO: 719 - RNA, 21 nt, Artificial Sequence
  SAMD9 targeting guide sequence portion
cacuggucaauuuuuccuucg

SEQ ID NO: 720 - RNA, 21 nt, Artificial Sequence
  SAMD9 targeting guide sequence portion
ccuucgugaacaagucuuucc

SEQ ID NO: 721 - RNA, 21 nt, Artificial Sequence
  SAMD9 targeting guide sequence portion
cgaaggaaaaauugaccagug

SEQ ID NO: 722 - RNA, 21 nt, Artificial Sequence
  SAMD9 targeting guide sequence portion
cgugaacaagucuuuccaguc

SEQ ID NO: 723 - RNA, 21 nt, Artificial Sequence
  SAMD9 targeting guide sequence portion
cuggaaagacuuguucacgaa

SEQ ID NO: 724 - RNA, 21 nt, Artificial Sequence
  SAMD9 targeting guide sequence portion
cuggucaauuuuuccuucgug

SEQ ID NO: 725 - RNA, 21 nt, Artificial Sequence
  SAMD9 targeting guide sequence portion
cuuaaagcacuggucaauuuu

SEQ ID NO: 726 - RNA, 21 nt, Artificial Sequence
  SAMD9 targeting guide sequence portion
cuucgugaacaagucuuucca

SEQ ID NO: 727 - RNA, 21 nt, Artificial Sequence
  SAMD9 targeting guide sequence portion
cuuguucacgaaggaaaaauu

SEQ ID NO: 728 - RNA, 21 nt, Artificial Sequence
  SAMD9 targeting guide sequence portion
gaaagacuuguucacgaagga

SEQ ID NO: 729 - RNA, 21 nt, Artificial Sequence
  SAMD9 targeting guide sequence portion
gaaggaaaaauugaccagugc

SEQ ID NO: 730 - RNA, 21 nt, Artificial Sequence
  SAMD9 targeting guide sequence portion
gacuggaaagacuuguucacg

SEQ ID NO: 731 - RNA, 21 nt, Artificial Sequence
  SAMD9 targeting guide sequence portion
gacuuguucacgaaggaaaaa

SEQ ID NO: 732 - RNA, 21 nt, Artificial Sequence
  SAMD9 targeting guide sequence portion
gcacuggucaauuuuuccuuc

SEQ ID NO: 733 - RNA, 21 nt, Artificial Sequence
  SAMD9 targeting guide sequence portion
ggaaagacuuguucacgaagg

SEQ ID NO: 734 - RNA, 21 nt, Artificial Sequence
  SAMD9 targeting guide sequence portion
ggucaauuuuuccuucgugaa

SEQ ID NO: 735 - RNA, 21 nt, Artificial Sequence
  SAMD9 targeting guide sequence portion
guaaaagacuggaaagacuug

SEQ ID NO: 736 - RNA, 21 nt, Artificial Sequence
  SAMD9 targeting guide sequence portion
gucaauuuuuccuucgugaac

SEQ ID NO: 737 - RNA, 21 nt, Artificial Sequence
  SAMD9 targeting guide sequence portion
guucacgaaggaaaaauugac

SEQ ID NO: 738 - RNA, 21 nt, Artificial Sequence
  SAMD9 targeting guide sequence portion
uaaaagacuggaaagacuugu

SEQ ID NO: 739 - RNA, 21 nt, Artificial Sequence
  SAMD9 targeting guide sequence portion
uaaagcacuggucaauuuuuc

SEQ ID NO: 740 - RNA, 21 nt, Artificial Sequence
  SAMD9 targeting guide sequence portion
ucaauuuuuccuucgugaaca

SEQ ID NO: 741 - RNA, 21 nt, Artificial Sequence
  SAMD9 targeting guide sequence portion
ucacgaaggaaaaauugacca

SEQ ID NO: 742 - RNA, 21 nt, Artificial Sequence
  SAMD9 targeting guide sequence portion
uccuucgugaacaagucuuuc

SEQ ID NO: 743 - RNA, 21 nt, Artificial Sequence
  SAMD9 targeting guide sequence portion
ucgugaacaagucuuuccagu

SEQ ID NO: 744 - RNA, 21 nt, Artificial Sequence
  SAMD9 targeting guide sequence portion
uggaaagacuuguucacgaag

SEQ ID NO: 745 - RNA, 21 nt, Artificial Sequence
  SAMD9 targeting guide sequence portion
uggucaauuuuuccuucguga

SEQ ID NO: 746 - RNA, 21 nt, Artificial Sequence
  SAMD9 targeting guide sequence portion
uguucacgaaggaaaaauuga

SEQ ID NO: 747 - RNA, 21 nt, Artificial Sequence
  SAMD9 targeting guide sequence portion
uuaaagcacuggucaauuuuu

SEQ ID NO: 748 - RNA, 21 nt, Artificial Sequence
  SAMD9 targeting guide sequence portion
uucacgaaggaaaaauugacc

SEQ ID NO: 749 - RNA, 21 nt, Artificial Sequence
  SAMD9 targeting guide sequence portion
uuccuucgugaacaagucuuu

SEQ ID NO: 750 - RNA, 21 nt, Artificial Sequence
  SAMD9 targeting guide sequence portion
uucgugaacaagucuuuccag

SEQ ID NO: 751 - RNA, 21 nt, Artificial Sequence
  SAMD9 targeting guide sequence portion
uuguucacgaaggaaaaauug

SEQ ID NO: 752 - RNA, 21 nt, Artificial Sequence
  SAMD9 targeting guide sequence portion
uuuccuucgugaacaagucuu

SEQ ID NO: 753 - RNA, 21 nt, Artificial Sequence
  SAMD9 targeting guide sequence portion
uuuuccuucgugaacaagucu

SEQ ID NO: 754 - RNA, 21 nt, Artificial Sequence
  SAMD9 targeting guide sequence portion
uuuuuccuucgugaacaaguc

SEQ ID NO: 755 - RNA, 22 nt, Artificial Sequence
  SAMD9 targeting guide sequence portion
aaaagacuggaaagacuuguuc

SEQ ID NO: 756 - RNA, 22 nt, Artificial Sequence
  SAMD9 targeting guide sequence portion
aaagacuggaaagacuuguuca

SEQ ID NO: 757 - RNA, 22 nt, Artificial Sequence
  SAMD9 targeting guide sequence portion
aaagacuuguucacgaaggaaa

SEQ ID NO: 758 - RNA, 22 nt, Artificial Sequence
  SAMD9 targeting guide sequence portion
aaagcacuggucaauuuuuccu

SEQ ID NO: 759 - RNA, 22 nt, Artificial Sequence
  SAMD9 targeting guide sequence portion
aagacuggaaagacuuguucac

SEQ ID NO: 760 - RNA, 22 nt, Artificial Sequence
  SAMD9 targeting guide sequence portion
aagacuuguucacgaaggaaaa

SEQ ID NO: 761 - RNA, 22 nt, Artificial Sequence
  SAMD9 targeting guide sequence portion
aagcacuggucaauuuuuccuu

SEQ ID NO: 762 - RNA, 22 nt, Artificial Sequence
  SAMD9 targeting guide sequence portion
aauuuuuccuucgugaacaagu

SEQ ID NO: 763 - RNA, 22 nt, Artificial Sequence
  SAMD9 targeting guide sequence portion
acgaaggaaaaauugaccagug

SEQ ID NO: 764 - RNA, 22 nt, Artificial Sequence
  SAMD9 targeting guide sequence portion
acuggaaagacuuguucacgaa

SEQ ID NO: 765 - RNA, 22 nt, Artificial Sequence
  SAMD9 targeting guide sequence portion
acuggucaauuuuuccuucgug

SEQ ID NO: 766 - RNA, 22 nt, Artificial Sequence
  SAMD9 targeting guide sequence portion
acuuguucacgaaggaaaaauu

SEQ ID NO: 767 - RNA, 22 nt, Artificial Sequence
  SAMD9 targeting guide sequence portion
agacuggaaagacuuguucacg

SEQ ID NO: 768 - RNA, 22 nt, Artificial Sequence
  SAMD9 targeting guide sequence portion
agacuuguucacgaaggaaaaa

SEQ ID NO: 769 - RNA, 22 nt, Artificial Sequence
  SAMD9 targeting guide sequence portion
agcacuggucaauuuuuccuuc

SEQ ID NO: 770 - RNA, 22 nt, Artificial Sequence
  SAMD9 targeting guide sequence portion
auuuuuccuucgugaacaaguc

SEQ ID NO: 771 - RNA, 22 nt, Artificial Sequence
  SAMD9 targeting guide sequence portion
caauuuuuccuucgugaacaag

SEQ ID NO: 772 - RNA, 22 nt, Artificial Sequence
  SAMD9 targeting guide sequence portion
cacgaaggaaaaauugaccagu

SEQ ID NO: 773 - RNA, 22 nt, Artificial Sequence
  SAMD9 targeting guide sequence portion
cacuggucaauuuuuccuucgu

SEQ ID NO: 774 - RNA, 22 nt, Artificial Sequence
  SAMD9 targeting guide sequence portion
ccuucgugaacaagucuuucca

SEQ ID NO: 775 - RNA, 22 nt, Artificial Sequence
  SAMD9 targeting guide sequence portion
cgaaggaaaaauugaccagugc

SEQ ID NO: 776 - RNA, 22 nt, Artificial Sequence
  SAMD9 targeting guide sequence portion
cgugaacaagucuuuccagucu

SEQ ID NO: 777 - RNA, 22 nt, Artificial Sequence
  SAMD9 targeting guide sequence portion
cuggaaagacuuguucacgaag

SEQ ID NO: 778 - RNA, 22 nt, Artificial Sequence
  SAMD9 targeting guide sequence portion
cuggucaauuuuuccuucguga

SEQ ID NO: 779 - RNA, 22 nt, Artificial Sequence
  SAMD9 targeting guide sequence portion
cuuaaagcacuggucaauuuuu

SEQ ID NO: 780 - RNA, 22 nt, Artificial Sequence
  SAMD9 targeting guide sequence portion
cuucgugaacaagucuuuccag

SEQ ID NO: 781 - RNA, 22 nt, Artificial Sequence
  SAMD9 targeting guide sequence portion
cuuguucacgaaggaaaaauug

SEQ ID NO: 782 - RNA, 22 nt, Artificial Sequence
  SAMD9 targeting guide sequence portion
gaaagacuuguucacgaaggaa

SEQ ID NO: 783 - RNA, 22 nt, Artificial Sequence
  SAMD9 targeting guide sequence portion
gaaggaaaaauugaccagugcu

SEQ ID NO: 784 - RNA, 22 nt, Artificial Sequence
  SAMD9 targeting guide sequence portion
gacuggaaagacuuguucacga

SEQ ID NO: 785 - RNA, 22 nt, Artificial Sequence
  SAMD9 targeting guide sequence portion
gacuuguucacgaaggaaaaau

SEQ ID NO: 786 - RNA, 22 nt, Artificial Sequence
  SAMD9 targeting guide sequence portion
gcacuggucaauuuuuccuucg

SEQ ID NO: 787 - RNA, 22 nt, Artificial Sequence
  SAMD9 targeting guide sequence portion
ggaaagacuuguucacgaagga

SEQ ID NO: 788 - RNA, 22 nt, Artificial Sequence
  SAMD9 targeting guide sequence portion
gguaaaagacuggaaagacuug

SEQ ID NO: 789 - RNA, 22 nt, Artificial Sequence
  SAMD9 targeting guide sequence portion
ggucaauuuuuccuucgugaac

SEQ ID NO: 790 - RNA, 22 nt, Artificial Sequence
  SAMD9 targeting guide sequence portion
guaaaagacuggaaagacuugu

SEQ ID NO: 791 - RNA, 22 nt, Artificial Sequence
  SAMD9 targeting guide sequence portion
gucaauuuuuccuucgugaaca

SEQ ID NO: 792 - RNA, 22 nt, Artificial Sequence
  SAMD9 targeting guide sequence portion
guucacgaaggaaaaauugacc

SEQ ID NO: 793 - RNA, 22 nt, Artificial Sequence
  SAMD9 targeting guide sequence portion
uaaaagacuggaaagacuuguu

SEQ ID NO: 794 - RNA, 22 nt, Artificial Sequence
  SAMD9 targeting guide sequence portion
uaaagcacuggucaauuuuucc

SEQ ID NO: 795 - RNA, 22 nt, Artificial Sequence
  SAMD9 targeting guide sequence portion
ucaauuuuuccuucgugaacaa

SEQ ID NO: 796 - RNA, 22 nt, Artificial Sequence
  SAMD9 targeting guide sequence portion
ucacgaaggaaaaauugaccag

SEQ ID NO: 797 - RNA, 22 nt, Artificial Sequence
  SAMD9 targeting guide sequence portion
uccuucgugaacaagucuuucc

SEQ ID NO: 798 - RNA, 22 nt, Artificial Sequence
  SAMD9 targeting guide sequence portion
ucgugaacaagucuuuccaguc

SEQ ID NO: 799 - RNA, 22 nt, Artificial Sequence
  SAMD9 targeting guide sequence portion
ucuuaaagcacuggucaauuuu

SEQ ID NO: 800 - RNA, 22 nt, Artificial Sequence
  SAMD9 targeting guide sequence portion
uggaaagacuuguucacgaagg

SEQ ID NO: 801 - RNA, 22 nt, Artificial Sequence
  SAMD9 targeting guide sequence portion
uggucaauuuuuccuucgugaa

SEQ ID NO: 802 - RNA, 22 nt, Artificial Sequence
  SAMD9 targeting guide sequence portion
uguucacgaaggaaaaauugac

SEQ ID NO: 803 - RNA, 22 nt, Artificial Sequence
  SAMD9 targeting guide sequence portion
uuaaagcacuggucaauuuuuc

SEQ ID NO: 804 - RNA, 22 nt, Artificial Sequence
  SAMD9 targeting guide sequence portion
uucacgaaggaaaaauugacca

SEQ ID NO: 805 - RNA, 22 nt, Artificial Sequence
  SAMD9 targeting guide sequence portion
uuccuucgugaacaagucuuuc

SEQ ID NO: 806 - RNA, 22 nt, Artificial Sequence
  SAMD9 targeting guide sequence portion
uucgugaacaagucuuuccagu

SEQ ID NO: 807 - RNA, 22 nt, Artificial Sequence
  SAMD9 targeting guide sequence portion
uuguucacgaaggaaaaauuga

SEQ ID NO: 808 - RNA, 22 nt, Artificial Sequence
  SAMD9 targeting guide sequence portion
uuuccuucgugaacaagucuuu

SEQ ID NO: 809 - RNA, 22 nt, Artificial Sequence
  SAMD9 targeting guide sequence portion
uuuuccuucgugaacaagucuu

SEQ ID NO: 810 - RNA, 22 nt, Artificial Sequence
  SAMD9 targeting guide sequence portion
uuuuuccuucgugaacaagucu

SEQ ID NO: 811 - RNA, 20 nt, Artificial Sequence
  SAMD9 targeting guide sequence portion
aaaaucaacuagaucaacau

SEQ ID NO: 812 - RNA, 20 nt, Artificial Sequence
  SAMD9 targeting guide sequence portion
aaaucaacuagaucaacauu

SEQ ID NO: 813 - RNA, 20 nt, Artificial Sequence
  SAMD9 targeting guide sequence portion
aaucaacuagaucaacauuc

SEQ ID NO: 814 - RNA, 20 nt, Artificial Sequence
  SAMD9 targeting guide sequence portion
aauguugaucuaguugauuu

SEQ ID NO: 815 - RNA, 20 nt, Artificial Sequence
  SAMD9 targeting guide sequence portion
agaaaaucaacuagaucaac

SEQ ID NO: 816 - RNA, 20 nt, Artificial Sequence
  SAMD9 targeting guide sequence portion
agaauguugaucuaguugau

SEQ ID NO: 817 - RNA, 20 nt, Artificial Sequence
  SAMD9 targeting guide sequence portion
aguugauuuucuggccagaa

SEQ ID NO: 818 - RNA, 20 nt, Artificial Sequence
  SAMD9 targeting guide sequence portion
aucaacuagaucaacauucu

SEQ ID NO: 819 - RNA, 20 nt, Artificial Sequence
  SAMD9 targeting guide sequence portion
aucuaguugauuuucuggcc

SEQ ID NO: 820 - RNA, 20 nt, Artificial Sequence
  SAMD9 targeting guide sequence portion
auguugaucuaguugauuuu

SEQ ID NO: 821 - RNA, 20 nt, Artificial Sequence
  SAMD9 targeting guide sequence portion
auucuggccagaaaaucaac

SEQ ID NO: 822 - RNA, 20 nt, Artificial Sequence
  SAMD9 targeting guide sequence portion
cagaaaaucaacuagaucaa

SEQ ID NO: 823 - RNA, 20 nt, Artificial Sequence
  SAMD9 targeting guide sequence portion
cagaauguugaucuaguuga

SEQ ID NO: 824 - RNA, 20 nt, Artificial Sequence
  SAMD9 targeting guide sequence portion
ccagaaaaucaacuagauca

SEQ ID NO: 825 - RNA, 20 nt, Artificial Sequence
  SAMD9 targeting guide sequence portion
cuaguugauuuucuggccag

SEQ ID NO: 826 - RNA, 20 nt, Artificial Sequence
  SAMD9 targeting guide sequence portion
cucuuauucuggccagaaaa

SEQ ID NO: 827 - RNA, 20 nt, Artificial Sequence
  SAMD9 targeting guide sequence portion
cuggccagaaaaucaacuag

SEQ ID NO: 828 - RNA, 20 nt, Artificial Sequence
  SAMD9 targeting guide sequence portion
cuuauucuggccagaaaauc

SEQ ID NO: 829 - RNA, 20 nt, Artificial Sequence
  SAMD9 targeting guide sequence portion
gaaaaucaacuagaucaaca

SEQ ID NO: 830 - RNA, 20 nt, Artificial Sequence
  SAMD9 targeting guide sequence portion
gaauguugaucuaguugauu

SEQ ID NO: 831 - RNA, 20 nt, Artificial Sequence
  SAMD9 targeting guide sequence portion
gaucuaguugauuuucuggc

SEQ ID NO: 832 - RNA, 20 nt, Artificial Sequence
  SAMD9 targeting guide sequence portion
gccagaaaaucaacuagauc

SEQ ID NO: 833 - RNA, 20 nt, Artificial Sequence
  SAMD9 targeting guide sequence portion
ggccagaaaaucaacuagau

SEQ ID NO: 834 - RNA, 20 nt, Artificial Sequence
  SAMD9 targeting guide sequence portion
guucagaauguugaucuagu

SEQ ID NO: 835 - RNA, 20 nt, Artificial Sequence
  SAMD9 targeting guide sequence portion
guugaucuaguugauuuucu

SEQ ID NO: 836 - RNA, 20 nt, Artificial Sequence
  SAMD9 targeting guide sequence portion
uaguugauuuucuggccaga

SEQ ID NO: 837 - RNA, 20 nt, Artificial Sequence
  SAMD9 targeting guide sequence portion
uauucuggccagaaaaucaa

SEQ ID NO: 838 - RNA, 20 nt, Artificial Sequence
  SAMD9 targeting guide sequence portion
ucaacuagaucaacauucug

SEQ ID NO: 839 - RNA, 20 nt, Artificial Sequence
  SAMD9 targeting guide sequence portion
ucagaauguugaucuaguug

SEQ ID NO: 840 - RNA, 20 nt, Artificial Sequence
  SAMD9 targeting guide sequence portion
ucuaguugauuuucuggcca

SEQ ID NO: 841 - RNA, 20 nt, Artificial Sequence
  SAMD9 targeting guide sequence portion
ucuggccagaaaaucaacua

SEQ ID NO: 842 - RNA, 20 nt, Artificial Sequence
  SAMD9 targeting guide sequence portion
ucuuauucuggccagaaaau

SEQ ID NO: 843 - RNA, 20 nt, Artificial Sequence
  SAMD9 targeting guide sequence portion
ugaucuaguugauuuucugg

SEQ ID NO: 844 - RNA, 20 nt, Artificial Sequence
  SAMD9 targeting guide sequence portion
uggccagaaaaucaacuaga

SEQ ID NO: 845 - RNA, 20 nt, Artificial Sequence
  SAMD9 targeting guide sequence portion
uguucagaauguugaucuag

SEQ ID NO: 846 - RNA, 20 nt, Artificial Sequence
  SAMD9 targeting guide sequence portion
uguugaucuaguugauuuuc

SEQ ID NO: 847 - RNA, 20 nt, Artificial Sequence
  SAMD9 targeting guide sequence portion
uuauucuggccagaaaauca

SEQ ID NO: 848 - RNA, 20 nt, Artificial Sequence
  SAMD9 targeting guide sequence portion
uucagaauguugaucuaguu

SEQ ID NO: 849 - RNA, 20 nt, Artificial Sequence
  SAMD9 targeting guide sequence portion
uucuggccagaaaaucaacu

SEQ ID NO: 850 - RNA, 20 nt, Artificial Sequence
  SAMD9 targeting guide sequence portion
uugaucuaguugauuuucug

SEQ ID NO: 851 - RNA, 20 nt, Artificial Sequence
  SAMD9 targeting guide sequence portion
uuguucagaauguugaucua

SEQ ID NO: 852 - RNA, 20 nt, Artificial Sequence
  SAMD9 targeting guide sequence portion
uuuguucagaauguugaucu

SEQ ID NO: 853 - RNA, 21 nt, Artificial Sequence
  SAMD9 targeting guide sequence portion
aaaaucaacuagaucaacauu

SEQ ID NO: 854 - RNA, 21 nt, Artificial Sequence
  SAMD9 targeting guide sequence portion
aaaucaacuagaucaacauuc

SEQ ID NO: 855 - RNA, 21 nt, Artificial Sequence
  SAMD9 targeting guide sequence portion
aaucaacuagaucaacauucu

SEQ ID NO: 856 - RNA, 21 nt, Artificial Sequence
  SAMD9 targeting guide sequence portion
aauguugaucuaguugauuuu

SEQ ID NO: 857 - RNA, 21 nt, Artificial Sequence
  SAMD9 targeting guide sequence portion
agaaaaucaacuagaucaaca

SEQ ID NO: 858 - RNA, 21 nt, Artificial Sequence
  SAMD9 targeting guide sequence portion
agaauguugaucuaguugauu

SEQ ID NO: 859 - RNA, 21 nt, Artificial Sequence
  SAMD9 targeting guide sequence portion
aguugauuuucuggccagaau

SEQ ID NO: 860 - RNA, 21 nt, Artificial Sequence
  SAMD9 targeting guide sequence portion
aucaacuagaucaacauucug

SEQ ID NO: 861 - RNA, 21 nt, Artificial Sequence
  SAMD9 targeting guide sequence portion
aucuaguugauuuucuggcca

SEQ ID NO: 862 - RNA, 21 nt, Artificial Sequence
  SAMD9 targeting guide sequence portion
auguugaucuaguugauuuuc

SEQ ID NO: 863 - RNA, 21 nt, Artificial Sequence
  SAMD9 targeting guide sequence portion
auucuggccagaaaaucaacu

SEQ ID NO: 864 - RNA, 21 nt, Artificial Sequence
  SAMD9 targeting guide sequence portion
auuuguucagaauguugaucu

SEQ ID NO: 865 - RNA, 21 nt, Artificial Sequence
  SAMD9 targeting guide sequence portion
cagaaaaucaacuagaucaac

SEQ ID NO: 866 - RNA, 21 nt, Artificial Sequence
  SAMD9 targeting guide sequence portion
cagaauguugaucuaguugau

SEQ ID NO: 867 - RNA, 21 nt, Artificial Sequence
  SAMD9 targeting guide sequence portion
ccagaaaaucaacuagaucaa

SEQ ID NO: 868 - RNA, 21 nt, Artificial Sequence
  SAMD9 targeting guide sequence portion
ccucuuauucuggccagaaaa

SEQ ID NO: 869 - RNA, 21 nt, Artificial Sequence
  SAMD9 targeting guide sequence portion
cuaguugauuuucuggccaga

SEQ ID NO: 870 - RNA, 21 nt, Artificial Sequence
  SAMD9 targeting guide sequence portion
cucuuauucuggccagaaaau

SEQ ID NO: 871 - RNA, 21 nt, Artificial Sequence
  SAMD9 targeting guide sequence portion
cuggccagaaaaucaacuaga

SEQ ID NO: 872 - RNA, 21 nt, Artificial Sequence
  SAMD9 targeting guide sequence portion
cuuauucuggccagaaaauca

SEQ ID NO: 873 - RNA, 21 nt, Artificial Sequence
  SAMD9 targeting guide sequence portion
gaaaaucaacuagaucaacau

SEQ ID NO: 874 - RNA, 21 nt, Artificial Sequence
  SAMD9 targeting guide sequence portion
gaauguugaucuaguugauuu

SEQ ID NO: 875 - RNA, 21 nt, Artificial Sequence
  SAMD9 targeting guide sequence portion
gaucuaguugauuuucuggcc

SEQ ID NO: 876 - RNA, 21 nt, Artificial Sequence
  SAMD9 targeting guide sequence portion
gccagaaaaucaacuagauca

SEQ ID NO: 877 - RNA, 21 nt, Artificial Sequence
  SAMD9 targeting guide sequence portion
ggccagaaaaucaacuagauc

SEQ ID NO: 878 - RNA, 21 nt, Artificial Sequence
  SAMD9 targeting guide sequence portion
guucagaauguugaucuaguu

SEQ ID NO: 879 - RNA, 21 nt, Artificial Sequence
  SAMD9 targeting guide sequence portion
guugaucuaguugauuuucug

SEQ ID NO: 880 - RNA, 21 nt, Artificial Sequence
  SAMD9 targeting guide sequence portion
uaguugauuuucuggccagaa

SEQ ID NO: 881 - RNA, 21 nt, Artificial Sequence
  SAMD9 targeting guide sequence portion
uauucuggccagaaaaucaac

SEQ ID NO: 882 - RNA, 21 nt, Artificial Sequence
  SAMD9 targeting guide sequence portion
ucaacuagaucaacauucuga

SEQ ID NO: 883 - RNA, 21 nt, Artificial Sequence
  SAMD9 targeting guide sequence portion
ucagaauguugaucuaguuga

SEQ ID NO: 884 - RNA, 21 nt, Artificial Sequence
  SAMD9 targeting guide sequence portion
ucuaguugauuuucuggccag

SEQ ID NO: 885 - RNA, 21 nt, Artificial Sequence
  SAMD9 targeting guide sequence portion
ucuggccagaaaaucaacuag

SEQ ID NO: 886 - RNA, 21 nt, Artificial Sequence
  SAMD9 targeting guide sequence portion
ucuuauucuggccagaaaauc

SEQ ID NO: 887 - RNA, 21 nt, Artificial Sequence
  SAMD9 targeting guide sequence portion
ugaucuaguugauuuucuggc

SEQ ID NO: 888 - RNA, 21 nt, Artificial Sequence
  SAMD9 targeting guide sequence portion
uggccagaaaaucaacuagau

SEQ ID NO: 889 - RNA, 21 nt, Artificial Sequence
  SAMD9 targeting guide sequence portion
uguucagaauguugaucuagu

SEQ ID NO: 890 - RNA, 21 nt, Artificial Sequence
  SAMD9 targeting guide sequence portion
uguugaucuaguugauuuucu

SEQ ID NO: 891 - RNA, 21 nt, Artificial Sequence
  SAMD9 targeting guide sequence portion
uuauucuggccagaaaaucaa

SEQ ID NO: 892 - RNA, 21 nt, Artificial Sequence
  SAMD9 targeting guide sequence portion
uucagaauguugaucuaguug

SEQ ID NO: 893 - RNA, 21 nt, Artificial Sequence
  SAMD9 targeting guide sequence portion
uucuggccagaaaaucaacua

SEQ ID NO: 894 - RNA, 21 nt, Artificial Sequence
  SAMD9 targeting guide sequence portion
uugaucuaguugauuuucugg

SEQ ID NO: 895 - RNA, 21 nt, Artificial Sequence
  SAMD9 targeting guide sequence portion
uuguucagaauguugaucuag

SEQ ID NO: 896 - RNA, 21 nt, Artificial Sequence
  SAMD9 targeting guide sequence portion
uuuguucagaauguugaucua

SEQ ID NO: 897 - RNA, 22 nt, Artificial Sequence
  SAMD9 targeting guide sequence portion
aaaaucaacuagaucaacauuc

SEQ ID NO: 898 - RNA, 22 nt, Artificial Sequence
  SAMD9 targeting guide sequence portion
aaaucaacuagaucaacauucu

SEQ ID NO: 899 - RNA, 22 nt, Artificial Sequence
  SAMD9 targeting guide sequence portion
aaucaacuagaucaacauucug

SEQ ID NO: 900 - RNA, 22 nt, Artificial Sequence
  SAMD9 targeting guide sequence portion
aauguugaucuaguugauuuuc

SEQ ID NO: 901 - RNA, 22 nt, Artificial Sequence
  SAMD9 targeting guide sequence portion
agaaaaucaacuagaucaacau

SEQ ID NO: 902 - RNA, 22 nt, Artificial Sequence
  SAMD9 targeting guide sequence portion
agaauguugaucuaguugauuu

SEQ ID NO: 903 - RNA, 22 nt, Artificial Sequence
  SAMD9 targeting guide sequence portion
aguugauuuucuggccagaaua

SEQ ID NO: 904 - RNA, 22 nt, Artificial Sequence
  SAMD9 targeting guide sequence portion
aucaacuagaucaacauucuga

SEQ ID NO: 905 - RNA, 22 nt, Artificial Sequence
  SAMD9 targeting guide sequence portion
aucuaguugauuuucuggccag

SEQ ID NO: 906 - RNA, 22 nt, Artificial Sequence
  SAMD9 targeting guide sequence portion
auguugaucuaguugauuuucu

SEQ ID NO: 907 - RNA, 22 nt, Artificial Sequence
  SAMD9 targeting guide sequence portion
auucuggccagaaaaucaacua

SEQ ID NO: 908 - RNA, 22 nt, Artificial Sequence
  SAMD9 targeting guide sequence portion
auuuguucagaauguugaucua

SEQ ID NO: 909 - RNA, 22 nt, Artificial Sequence
  SAMD9 targeting guide sequence portion
cagaaaaucaacuagaucaaca

SEQ ID NO: 910 - RNA, 22 nt, Artificial Sequence
  SAMD9 targeting guide sequence portion
cagaauguugaucuaguugauu

SEQ ID NO: 911 - RNA, 22 nt, Artificial Sequence
  SAMD9 targeting guide sequence portion
cauuuguucagaauguugaucu

SEQ ID NO: 912 - RNA, 22 nt, Artificial Sequence
  SAMD9 targeting guide sequence portion
ccagaaaaucaacuagaucaac

SEQ ID NO: 913 - RNA, 22 nt, Artificial Sequence
  SAMD9 targeting guide sequence portion
cccucuuauucuggccagaaaa

SEQ ID NO: 914 - RNA, 22 nt, Artificial Sequence
  SAMD9 targeting guide sequence portion
ccucuuauucuggccagaaaau

SEQ ID NO: 915 - RNA, 22 nt, Artificial Sequence
  SAMD9 targeting guide sequence portion
cuaguugauuuucuggccagaa

SEQ ID NO: 916 - RNA, 22 nt, Artificial Sequence
  SAMD9 targeting guide sequence portion
cucuuauucuggccagaaaauc

SEQ ID NO: 917 - RNA, 22 nt, Artificial Sequence
  SAMD9 targeting guide sequence portion
cuggccagaaaaucaacuagau

SEQ ID NO: 918 - RNA, 22 nt, Artificial Sequence
  SAMD9 targeting guide sequence portion
cuuauucuggccagaaaaucaa

SEQ ID NO: 919 - RNA, 22 nt, Artificial Sequence
  SAMD9 targeting guide sequence portion
gaaaaucaacuagaucaacauu

SEQ ID NO: 920 - RNA, 22 nt, Artificial Sequence
  SAMD9 targeting guide sequence portion
gaauguugaucuaguugauuuu

SEQ ID NO: 921 - RNA, 22 nt, Artificial Sequence
  SAMD9 targeting guide sequence portion
gaucuaguugauuuucuggcca

SEQ ID NO: 922 - RNA, 22 nt, Artificial Sequence
  SAMD9 targeting guide sequence portion
gccagaaaaucaacuagaucaa

SEQ ID NO: 923 - RNA, 22 nt, Artificial Sequence
  SAMD9 targeting guide sequence portion
ggccagaaaaucaacuagauca

SEQ ID NO: 924 - RNA, 22 nt, Artificial Sequence
  SAMD9 targeting guide sequence portion
guucagaauguugaucuaguug

SEQ ID NO: 925 - RNA, 22 nt, Artificial Sequence
  SAMD9 targeting guide sequence portion
guugaucuaguugauuuucugg

SEQ ID NO: 926 - RNA, 22 nt, Artificial Sequence
  SAMD9 targeting guide sequence portion
uaguugauuuucuggccagaau

SEQ ID NO: 927 - RNA, 22 nt, Artificial Sequence
  SAMD9 targeting guide sequence portion
uauucuggccagaaaaucaacu

SEQ ID NO: 928 - RNA, 22 nt, Artificial Sequence
  SAMD9 targeting guide sequence portion
ucaacuagaucaacauucugaa

SEQ ID NO: 929 - RNA, 22 nt, Artificial Sequence
  SAMD9 targeting guide sequence portion
ucagaauguugaucuaguugau

SEQ ID NO: 930 - RNA, 22 nt, Artificial Sequence
  SAMD9 targeting guide sequence portion
ucuaguugauuuucuggccaga

SEQ ID NO: 931 - RNA, 22 nt, Artificial Sequence
  SAMD9 targeting guide sequence portion
ucuggccagaaaaucaacuaga

SEQ ID NO: 932 - RNA, 22 nt, Artificial Sequence
  SAMD9 targeting guide sequence portion
ucuuauucuggccagaaaauca

SEQ ID NO: 933 - RNA, 22 nt, Artificial Sequence
  SAMD9 targeting guide sequence portion
ugaucuaguugauuuucuggcc

SEQ ID NO: 934 - RNA, 22 nt, Artificial Sequence
  SAMD9 targeting guide sequence portion
uggccagaaaaucaacuagauc

SEQ ID NO: 935 - RNA, 22 nt, Artificial Sequence
  SAMD9 targeting guide sequence portion
uguucagaauguugaucuaguu

SEQ ID NO: 936 - RNA, 22 nt, Artificial Sequence
  SAMD9 targeting guide sequence portion
uguugaucuaguugauuuucug

SEQ ID NO: 937 - RNA, 22 nt, Artificial Sequence
  SAMD9 targeting guide sequence portion
uuauucuggccagaaaaucaac

SEQ ID NO: 938 - RNA, 22 nt, Artificial Sequence
  SAMD9 targeting guide sequence portion
uucagaauguugaucuaguuga

SEQ ID NO: 939 - RNA, 22 nt, Artificial Sequence
  SAMD9 targeting guide sequence portion
uucuggccagaaaaucaacuag

SEQ ID NO: 940 - RNA, 22 nt, Artificial Sequence
  SAMD9 targeting guide sequence portion
uugaucuaguugauuuucuggc

SEQ ID NO: 941 - RNA, 22 nt, Artificial Sequence
  SAMD9 targeting guide sequence portion
uuguucagaauguugaucuagu

SEQ ID NO: 942 - RNA, 22 nt, Artificial Sequence
  SAMD9 targeting guide sequence portion
uuuguucagaauguugaucuag

SEQ ID NO: 943 - RNA, 20 nt, Artificial Sequence
  SAMD9 targeting guide sequence portion
aacauuauucucuccuguau

SEQ ID NO: 944 - RNA, 20 nt, Artificial Sequence
  SAMD9 targeting guide sequence portion
aaucuaccuccagauuagua

SEQ ID NO: 945 - RNA, 20 nt, Artificial Sequence
  SAMD9 targeting guide sequence portion
aaucuggagguagauuggau

SEQ ID NO: 946 - RNA, 20 nt, Artificial Sequence
  SAMD9 targeting guide sequence portion
acauuauucucuccuguauc

SEQ ID NO: 947 - RNA, 20 nt, Artificial Sequence
  SAMD9 targeting guide sequence portion
acuaaucuggagguagauug

SEQ ID NO: 948 - RNA, 20 nt, Artificial Sequence
  SAMD9 targeting guide sequence portion
acuggcuuuacuaaucugga

SEQ ID NO: 949 - RNA, 20 nt, Artificial Sequence
  SAMD9 targeting guide sequence portion
agauuggauacaggagagaa

SEQ ID NO: 950 - RNA, 20 nt, Artificial Sequence
  SAMD9 targeting guide sequence portion
agguagauuggauacaggag

SEQ ID NO: 951 - RNA, 20 nt, Artificial Sequence
  SAMD9 targeting guide sequence portion
auccaaucuaccuccagauu

SEQ ID NO: 952 - RNA, 20 nt, Artificial Sequence
  SAMD9 targeting guide sequence portion
aucuaccuccagauuaguaa

SEQ ID NO: 953 - RNA, 20 nt, Artificial Sequence
  SAMD9 targeting guide sequence portion
aucuggagguagauuggaua

SEQ ID NO: 954 - RNA, 20 nt, Artificial Sequence
  SAMD9 targeting guide sequence portion
auuauucucuccuguaucca

SEQ ID NO: 955 - RNA, 20 nt, Artificial Sequence
  SAMD9 targeting guide sequence portion
auucucuccuguauccaauc

SEQ ID NO: 956 - RNA, 20 nt, Artificial Sequence
  SAMD9 targeting guide sequence portion
auuggauacaggagagaaua

SEQ ID NO: 957 - RNA, 20 nt, Artificial Sequence
  SAMD9 targeting guide sequence portion
caacauuauucucuccugua

SEQ ID NO: 958 - RNA, 20 nt, Artificial Sequence
  SAMD9 targeting guide sequence portion
caaucuaccuccagauuagu

SEQ ID NO: 959 - RNA, 20 nt, Artificial Sequence
  SAMD9 targeting guide sequence portion
cauuauucucuccuguaucc

SEQ ID NO: 960 - RNA, 20 nt, Artificial Sequence
  SAMD9 targeting guide sequence portion
ccaaucuaccuccagauuag

SEQ ID NO: 961 - RNA, 20 nt, Artificial Sequence
  SAMD9 targeting guide sequence portion
ccuguauccaaucuaccucc

SEQ ID NO: 962 - RNA, 20 nt, Artificial Sequence
  SAMD9 targeting guide sequence portion
cuaaucuggagguagauugg

SEQ ID NO: 963 - RNA, 20 nt, Artificial Sequence
  SAMD9 targeting guide sequence portion
cuccuguauccaaucuaccu

SEQ ID NO: 964 - RNA, 20 nt, Artificial Sequence
  SAMD9 targeting guide sequence portion
cucuccuguauccaaucuac

SEQ ID NO: 965 - RNA, 20 nt, Artificial Sequence
  SAMD9 targeting guide sequence portion
cuggagguagauuggauaca

SEQ ID NO: 966 - RNA, 20 nt, Artificial Sequence
  SAMD9 targeting guide sequence portion
cuggcuuuacuaaucuggag

SEQ ID NO: 967 - RNA, 20 nt, Artificial Sequence
  SAMD9 targeting guide sequence portion
cuguauccaaucuaccucca

SEQ ID NO: 968 - RNA, 20 nt, Artificial Sequence
  SAMD9 targeting guide sequence portion
cuuuacuaaucuggagguag

SEQ ID NO: 969 - RNA, 20 nt, Artificial Sequence
  SAMD9 targeting guide sequence portion
gagguagauuggauacagga

SEQ ID NO: 970 - RNA, 20 nt, Artificial Sequence
  SAMD9 targeting guide sequence portion
gauuggauacaggagagaau

SEQ ID NO: 971 - RNA, 20 nt, Artificial Sequence
  SAMD9 targeting guide sequence portion
gcuuuacuaaucuggaggua

SEQ ID NO: 972 - RNA, 20 nt, Artificial Sequence
  SAMD9 targeting guide sequence portion
ggagguagauuggauacagg

SEQ ID NO: 973 - RNA, 20 nt, Artificial Sequence
  SAMD9 targeting guide sequence portion
ggcuuuacuaaucuggaggu

SEQ ID NO: 974 - RNA, 20 nt, Artificial Sequence
  SAMD9 targeting guide sequence portion
gguagauuggauacaggaga

SEQ ID NO: 975 - RNA, 20 nt, Artificial Sequence
  SAMD9 targeting guide sequence portion
guagauuggauacaggagag

SEQ ID NO: 976 - RNA, 20 nt, Artificial Sequence
  SAMD9 targeting guide sequence portion
guauccaaucuaccuccaga

SEQ ID NO: 977 - RNA, 20 nt, Artificial Sequence
  SAMD9 targeting guide sequence portion
uaaucuggagguagauugga

SEQ ID NO: 978 - RNA, 20 nt, Artificial Sequence
  SAMD9 targeting guide sequence portion
uacuaaucuggagguagauu

SEQ ID NO: 979 - RNA, 20 nt, Artificial Sequence
  SAMD9 targeting guide sequence portion
uagauuggauacaggagaga

SEQ ID NO: 980 - RNA, 20 nt, Artificial Sequence
  SAMD9 targeting guide sequence portion
uauccaaucuaccuccagau

SEQ ID NO: 981 - RNA, 20 nt, Artificial Sequence
  SAMD9 targeting guide sequence portion
uauucucuccuguauccaau

SEQ ID NO: 982 - RNA, 20 nt, Artificial Sequence
  SAMD9 targeting guide sequence portion
uccaaucuaccuccagauua

SEQ ID NO: 983 - RNA, 20 nt, Artificial Sequence
  SAMD9 targeting guide sequence portion
uccuguauccaaucuaccuc

SEQ ID NO: 984 - RNA, 20 nt, Artificial Sequence
  SAMD9 targeting guide sequence portion
ucuaccuccagauuaguaaa

SEQ ID NO: 985 - RNA, 20 nt, Artificial Sequence
  SAMD9 targeting guide sequence portion
ucuccuguauccaaucuacc

SEQ ID NO: 986 - RNA, 20 nt, Artificial Sequence
  SAMD9 targeting guide sequence portion
ucucuccuguauccaaucua

SEQ ID NO: 987 - RNA, 20 nt, Artificial Sequence
  SAMD9 targeting guide sequence portion
ucuggagguagauuggauac

SEQ ID NO: 988 - RNA, 20 nt, Artificial Sequence
  SAMD9 targeting guide sequence portion
uggagguagauuggauacag

SEQ ID NO: 989 - RNA, 20 nt, Artificial Sequence
  SAMD9 targeting guide sequence portion
uggcuuuacuaaucuggagg

SEQ ID NO: 990 - RNA, 20 nt, Artificial Sequence
  SAMD9 targeting guide sequence portion
uguauccaaucuaccuccag

SEQ ID NO: 991 - RNA, 20 nt, Artificial Sequence
  SAMD9 targeting guide sequence portion
uuacuaaucuggagguagau

SEQ ID NO: 992 - RNA, 20 nt, Artificial Sequence
  SAMD9 targeting guide sequence portion
uuauucucuccuguauccaa

SEQ ID NO: 993 - RNA, 20 nt, Artificial Sequence
  SAMD9 targeting guide sequence portion
uucucuccuguauccaaucu

SEQ ID NO: 994 - RNA, 20 nt, Artificial Sequence
  SAMD9 targeting guide sequence portion
uuuacuaaucuggagguaga

SEQ ID NO: 995 - RNA, 21 nt, Artificial Sequence
  SAMD9 targeting guide sequence portion
aacauuauucucuccuguauc

SEQ ID NO: 996 - RNA, 21 nt, Artificial Sequence
  SAMD9 targeting guide sequence portion
aacuggcuuuacuaaucugga

SEQ ID NO: 997 - RNA, 21 nt, Artificial Sequence
  SAMD9 targeting guide sequence portion
aaucuaccuccagauuaguaa

SEQ ID NO: 998 - RNA, 21 nt, Artificial Sequence
  SAMD9 targeting guide sequence portion
aaucuggagguagauuggaua

SEQ ID NO: 999 - RNA, 21 nt, Artificial Sequence
  SAMD9 targeting guide sequence portion
acauuauucucuccuguaucc

SEQ ID NO: 1000 - RNA, 21 nt, Artificial Sequence
  SAMD9 targeting guide sequence portion
acuaaucuggagguagauugg

SEQ ID NO: 1001 - RNA, 21 nt, Artificial Sequence
  SAMD9 targeting guide sequence portion
acuggcuuuacuaaucuggag

SEQ ID NO: 1002 - RNA, 21 nt, Artificial Sequence
  SAMD9 targeting guide sequence portion
agauuggauacaggagagaau

SEQ ID NO: 1003 - RNA, 21 nt, Artificial Sequence
  SAMD9 targeting guide sequence portion
agguagauuggauacaggaga

SEQ ID NO: 1004 - RNA, 21 nt, Artificial Sequence
  SAMD9 targeting guide sequence portion
auccaaucuaccuccagauua

SEQ ID NO: 1005 - RNA, 21 nt, Artificial Sequence
  SAMD9 targeting guide sequence portion
aucuaccuccagauuaguaaa

SEQ ID NO: 1006 - RNA, 21 nt, Artificial Sequence
  SAMD9 targeting guide sequence portion
aucuggagguagauuggauac

SEQ ID NO: 1007 - RNA, 21 nt, Artificial Sequence
  SAMD9 targeting guide sequence portion
auuauucucuccuguauccaa

SEQ ID NO: 1008 - RNA, 21 nt, Artificial Sequence
  SAMD9 targeting guide sequence portion
auucucuccuguauccaaucu

SEQ ID NO: 1009 - RNA, 21 nt, Artificial Sequence
  SAMD9 targeting guide sequence portion
auuggauacaggagagaauaa

SEQ ID NO: 1010 - RNA, 21 nt, Artificial Sequence
  SAMD9 targeting guide sequence portion
caacauuauucucuccuguau

SEQ ID NO: 1011 - RNA, 21 nt, Artificial Sequence
  SAMD9 targeting guide sequence portion
caaucuaccuccagauuagua

SEQ ID NO: 1012 - RNA, 21 nt, Artificial Sequence
  SAMD9 targeting guide sequence portion
cauuauucucuccuguaucca

SEQ ID NO: 1013 - RNA, 21 nt, Artificial Sequence
  SAMD9 targeting guide sequence portion
ccaacauuauucucuccugua

SEQ ID NO: 1014 - RNA, 21 nt, Artificial Sequence
  SAMD9 targeting guide sequence portion
ccaaucuaccuccagauuagu

SEQ ID NO: 1015 - RNA, 21 nt, Artificial Sequence
  SAMD9 targeting guide sequence portion
ccuguauccaaucuaccucca

SEQ ID NO: 1016 - RNA, 21 nt, Artificial Sequence
  SAMD9 targeting guide sequence portion
cuaaucuggagguagauugga

SEQ ID NO: 1017 - RNA, 21 nt, Artificial Sequence
  SAMD9 targeting guide sequence portion
cuccuguauccaaucuaccuc

SEQ ID NO: 1018 - RNA, 21 nt, Artificial Sequence
  SAMD9 targeting guide sequence portion
cucuccuguauccaaucuacc

SEQ ID NO: 1019 - RNA, 21 nt, Artificial Sequence
  SAMD9 targeting guide sequence portion
cuggagguagauuggauacag

SEQ ID NO: 1020 - RNA, 21 nt, Artificial Sequence
  SAMD9 targeting guide sequence portion
cuggcuuuacuaaucuggagg

SEQ ID NO: 1021 - RNA, 21 nt, Artificial Sequence
  SAMD9 targeting guide sequence portion
cuguauccaaucuaccuccag

SEQ ID NO: 1022 - RNA, 21 nt, Artificial Sequence
  SAMD9 targeting guide sequence portion
cuuuacuaaucuggagguaga

SEQ ID NO: 1023 - RNA, 21 nt, Artificial Sequence
  SAMD9 targeting guide sequence portion
gagguagauuggauacaggag

SEQ ID NO: 1024 - RNA, 21 nt, Artificial Sequence
  SAMD9 targeting guide sequence portion
gauuggauacaggagagaaua

SEQ ID NO: 1025 - RNA, 21 nt, Artificial Sequence
  SAMD9 targeting guide sequence portion
gcuuuacuaaucuggagguag

SEQ ID NO: 1026 - RNA, 21 nt, Artificial Sequence
  SAMD9 targeting guide sequence portion
ggagguagauuggauacagga

SEQ ID NO: 1027 - RNA, 21 nt, Artificial Sequence
  SAMD9 targeting guide sequence portion
ggcuuuacuaaucuggaggua

SEQ ID NO: 1028 - RNA, 21 nt, Artificial Sequence
  SAMD9 targeting guide sequence portion
gguagauuggauacaggagag

SEQ ID NO: 1029 - RNA, 21 nt, Artificial Sequence
  SAMD9 targeting guide sequence portion
guagauuggauacaggagaga

SEQ ID NO: 1030 - RNA, 21 nt, Artificial Sequence
  SAMD9 targeting guide sequence portion
guauccaaucuaccuccagau

SEQ ID NO: 1031 - RNA, 21 nt, Artificial Sequence
  SAMD9 targeting guide sequence portion
uaaucuggagguagauuggau

SEQ ID NO: 1032 - RNA, 21 nt, Artificial Sequence
  SAMD9 targeting guide sequence portion
uacuaaucuggagguagauug

SEQ ID NO: 1033 - RNA, 21 nt, Artificial Sequence
  SAMD9 targeting guide sequence portion
uagauuggauacaggagagaa

SEQ ID NO: 1034 - RNA, 21 nt, Artificial Sequence
  SAMD9 targeting guide sequence portion
uauccaaucuaccuccagauu

SEQ ID NO: 1035 - RNA, 21 nt, Artificial Sequence
  SAMD9 targeting guide sequence portion
uauucucuccuguauccaauc

SEQ ID NO: 1036 - RNA, 21 nt, Artificial Sequence
  SAMD9 targeting guide sequence portion
uccaaucuaccuccagauuag

SEQ ID NO: 1037 - RNA, 21 nt, Artificial Sequence
  SAMD9 targeting guide sequence portion
uccuguauccaaucuaccucc

SEQ ID NO: 1038 - RNA, 21 nt, Artificial Sequence
  SAMD9 targeting guide sequence portion
ucuaccuccagauuaguaaag

SEQ ID NO: 1039 - RNA, 21 nt, Artificial Sequence
  SAMD9 targeting guide sequence portion
ucuccuguauccaaucuaccu

SEQ ID NO: 1040 - RNA, 21 nt, Artificial Sequence
  SAMD9 targeting guide sequence portion
ucucuccuguauccaaucuac

SEQ ID NO: 1041 - RNA, 21 nt, Artificial Sequence
  SAMD9 targeting guide sequence portion
ucuggagguagauuggauaca

SEQ ID NO: 1042 - RNA, 21 nt, Artificial Sequence
  SAMD9 targeting guide sequence portion
uggagguagauuggauacagg

SEQ ID NO: 1043 - RNA, 21 nt, Artificial Sequence
  SAMD9 targeting guide sequence portion
uggcuuuacuaaucuggaggu

SEQ ID NO: 1044 - RNA, 21 nt, Artificial Sequence
  SAMD9 targeting guide sequence portion
uguauccaaucuaccuccaga

SEQ ID NO: 1045 - RNA, 21 nt, Artificial Sequence
  SAMD9 targeting guide sequence portion
uuacuaaucuggagguagauu

SEQ ID NO: 1046 - RNA, 21 nt, Artificial Sequence
  SAMD9 targeting guide sequence portion
uuauucucuccuguauccaau

SEQ ID NO: 1047 - RNA, 21 nt, Artificial Sequence
  SAMD9 targeting guide sequence portion
uucucuccuguauccaaucua

SEQ ID NO: 1048 - RNA, 21 nt, Artificial Sequence
  SAMD9 targeting guide sequence portion
uuuacuaaucuggagguagau

SEQ ID NO: 1049 - RNA, 22 nt, Artificial Sequence
  SAMD9 targeting guide sequence portion
aacauuauucucuccuguaucc

SEQ ID NO: 1050 - RNA, 22 nt, Artificial Sequence
  SAMD9 targeting guide sequence portion
aacuggcuuuacuaaucuggag

SEQ ID NO: 1051 - RNA, 22 nt, Artificial Sequence
  SAMD9 targeting guide sequence portion
aaucuaccuccagauuaguaaa

SEQ ID NO: 1052 - RNA, 22 nt, Artificial Sequence
  SAMD9 targeting guide sequence portion
aaucuggagguagauuggauac

SEQ ID NO: 1053 - RNA, 22 nt, Artificial Sequence
  SAMD9 targeting guide sequence portion
acauuauucucuccuguaucca

SEQ ID NO: 1054 - RNA, 22 nt, Artificial Sequence
  SAMD9 targeting guide sequence portion
acuaaucuggagguagauugga

SEQ ID NO: 1055 - RNA, 22 nt, Artificial Sequence
  SAMD9 targeting guide sequence portion
acuggcuuuacuaaucuggagg

SEQ ID NO: 1056 - RNA, 22 nt, Artificial Sequence
  SAMD9 targeting guide sequence portion
agauuggauacaggagagaaua

SEQ ID NO: 1057 - RNA, 22 nt, Artificial Sequence
  SAMD9 targeting guide sequence portion
agguagauuggauacaggagag

SEQ ID NO: 1058 - RNA, 22 nt, Artificial Sequence
  SAMD9 targeting guide sequence portion
auccaaucuaccuccagauuag

SEQ ID NO: 1059 - RNA, 22 nt, Artificial Sequence
  SAMD9 targeting guide sequence portion
aucuaccuccagauuaguaaag

SEQ ID NO: 1060 - RNA, 22 nt, Artificial Sequence
  SAMD9 targeting guide sequence portion
aucuggagguagauuggauaca

SEQ ID NO: 1061 - RNA, 22 nt, Artificial Sequence
  SAMD9 targeting guide sequence portion
auuauucucuccuguauccaau

SEQ ID NO: 1062 - RNA, 22 nt, Artificial Sequence
  SAMD9 targeting guide sequence portion
auucucuccuguauccaaucua

SEQ ID NO: 1063 - RNA, 22 nt, Artificial Sequence
  SAMD9 targeting guide sequence portion
auuggauacaggagagaauaau

SEQ ID NO: 1064 - RNA, 22 nt, Artificial Sequence
  SAMD9 targeting guide sequence portion
caacauuauucucuccuguauc

SEQ ID NO: 1065 - RNA, 22 nt, Artificial Sequence
  SAMD9 targeting guide sequence portion
caacuggcuuuacuaaucugga

SEQ ID NO: 1066 - RNA, 22 nt, Artificial Sequence
  SAMD9 targeting guide sequence portion
caaucuaccuccagauuaguaa

SEQ ID NO: 1067 - RNA, 22 nt, Artificial Sequence
  SAMD9 targeting guide sequence portion
cauuauucucuccuguauccaa

SEQ ID NO: 1068 - RNA, 22 nt, Artificial Sequence
  SAMD9 targeting guide sequence portion
ccaacauuauucucuccuguau

SEQ ID NO: 1069 - RNA, 22 nt, Artificial Sequence
  SAMD9 targeting guide sequence portion
ccaaucuaccuccagauuagua

SEQ ID NO: 1070 - RNA, 22 nt, Artificial Sequence
  SAMD9 targeting guide sequence portion
ccuguauccaaucuaccuccag

SEQ ID NO: 1071 - RNA, 22 nt, Artificial Sequence
  SAMD9 targeting guide sequence portion
cuaaucuggagguagauuggau

SEQ ID NO: 1072 - RNA, 22 nt, Artificial Sequence
  SAMD9 targeting guide sequence portion
cuccuguauccaaucuaccucc

SEQ ID NO: 1073 - RNA, 22 nt, Artificial Sequence
  SAMD9 targeting guide sequence portion
cucuccuguauccaaucuaccu

SEQ ID NO: 1074 - RNA, 22 nt, Artificial Sequence
  SAMD9 targeting guide sequence portion
cuggagguagauuggauacagg

SEQ ID NO: 1075 - RNA, 22 nt, Artificial Sequence
  SAMD9 targeting guide sequence portion
cuggcuuuacuaaucuggaggu

SEQ ID NO: 1076 - RNA, 22 nt, Artificial Sequence
  SAMD9 targeting guide sequence portion
cuguauccaaucuaccuccaga

SEQ ID NO: 1077 - RNA, 22 nt, Artificial Sequence
  SAMD9 targeting guide sequence portion
cuuuacuaaucuggagguagau

SEQ ID NO: 1078 - RNA, 22 nt, Artificial Sequence
  SAMD9 targeting guide sequence portion
gagguagauuggauacaggaga

SEQ ID NO: 1079 - RNA, 22 nt, Artificial Sequence
  SAMD9 targeting guide sequence portion
gauuggauacaggagagaauaa

SEQ ID NO: 1080 - RNA, 22 nt, Artificial Sequence
  SAMD9 targeting guide sequence portion
gccaacauuauucucuccugua

SEQ ID NO: 1081 - RNA, 22 nt, Artificial Sequence
  SAMD9 targeting guide sequence portion
gcuuuacuaaucuggagguaga

SEQ ID NO: 1082 - RNA, 22 nt, Artificial Sequence
  SAMD9 targeting guide sequence portion
ggagguagauuggauacaggag

SEQ ID NO: 1083 - RNA, 22 nt, Artificial Sequence
  SAMD9 targeting guide sequence portion
ggcuuuacuaaucuggagguag

SEQ ID NO: 1084 - RNA, 22 nt, Artificial Sequence
  SAMD9 targeting guide sequence portion
gguagauuggauacaggagaga

SEQ ID NO: 1085 - RNA, 22 nt, Artificial Sequence
  SAMD9 targeting guide sequence portion
guagauuggauacaggagagaa

SEQ ID NO: 1086 - RNA, 22 nt, Artificial Sequence
  SAMD9 targeting guide sequence portion
guauccaaucuaccuccagauu

SEQ ID NO: 1087 - RNA, 22 nt, Artificial Sequence
  SAMD9 targeting guide sequence portion
uaaucuggagguagauuggaua

SEQ ID NO: 1088 - RNA, 22 nt, Artificial Sequence
  SAMD9 targeting guide sequence portion
uacuaaucuggagguagauugg

SEQ ID NO: 1089 - RNA, 22 nt, Artificial Sequence
  SAMD9 targeting guide sequence portion
uagauuggauacaggagagaau

SEQ ID NO: 1090 - RNA, 22 nt, Artificial Sequence
  SAMD9 targeting guide sequence portion
uauccaaucuaccuccagauua

SEQ ID NO: 1091 - RNA, 22 nt, Artificial Sequence
  SAMD9 targeting guide sequence portion
uauucucuccuguauccaaucu

SEQ ID NO: 1092 - RNA, 22 nt, Artificial Sequence
  SAMD9 targeting guide sequence portion
uccaaucuaccuccagauuagu

SEQ ID NO: 1093 - RNA, 22 nt, Artificial Sequence
  SAMD9 targeting guide sequence portion
uccuguauccaaucuaccucca

SEQ ID NO: 1094 - RNA, 22 nt, Artificial Sequence
  SAMD9 targeting guide sequence portion
ucuaccuccagauuaguaaagc

SEQ ID NO: 1095 - RNA, 22 nt, Artificial Sequence
  SAMD9 targeting guide sequence portion
ucuccuguauccaaucuaccuc

SEQ ID NO: 1096 - RNA, 22 nt, Artificial Sequence
  SAMD9 targeting guide sequence portion
ucucuccuguauccaaucuacc

SEQ ID NO: 1097 - RNA, 22 nt, Artificial Sequence
  SAMD9 targeting guide sequence portion
ucuggagguagauuggauacag

SEQ ID NO: 1098 - RNA, 22 nt, Artificial Sequence
  SAMD9 targeting guide sequence portion
uggagguagauuggauacagga

SEQ ID NO: 1099 - RNA, 22 nt, Artificial Sequence
  SAMD9 targeting guide sequence portion
uggcuuuacuaaucuggaggua

SEQ ID NO: 1100 - RNA, 22 nt, Artificial Sequence
  SAMD9 targeting guide sequence portion
uguauccaaucuaccuccagau

SEQ ID NO: 1101 - RNA, 22 nt, Artificial Sequence
  SAMD9 targeting guide sequence portion
uuacuaaucuggagguagauug

SEQ ID NO: 1102 - RNA, 22 nt, Artificial Sequence
  SAMD9 targeting guide sequence portion
uuauucucuccuguauccaauc

SEQ ID NO: 1103 - RNA, 22 nt, Artificial Sequence
  SAMD9 targeting guide sequence portion
uucucuccuguauccaaucuac

SEQ ID NO: 1104 - RNA, 22 nt, Artificial Sequence
  SAMD9 targeting guide sequence portion
uuuacuaaucuggagguagauu

SEQ ID NO: 1105 - RNA, 20 nt, Artificial Sequence
  SAMD9 targeting guide sequence portion
aaaacucagagaaagguggc

SEQ ID NO: 1106 - RNA, 20 nt, Artificial Sequence
  SAMD9 targeting guide sequence portion
aaaauauccagccaccuuuc

SEQ ID NO: 1107 - RNA, 20 nt, Artificial Sequence
  SAMD9 targeting guide sequence portion
aaaaugaagaggccaaaacu

SEQ ID NO: 1108 - RNA, 20 nt, Artificial Sequence
  SAMD9 targeting guide sequence portion
aaacucagagaaagguggcu

SEQ ID NO: 1109 - RNA, 20 nt, Artificial Sequence
  SAMD9 targeting guide sequence portion
aaauauccagccaccuuucu

SEQ ID NO: 1110 - RNA, 20 nt, Artificial Sequence
  SAMD9 targeting guide sequence portion
aaaugaagaggccaaaacuc

SEQ ID NO: 1111 - RNA, 20 nt, Artificial Sequence
  SAMD9 targeting guide sequence portion
aacucagagaaagguggcug

SEQ ID NO: 1112 - RNA, 20 nt, Artificial Sequence
  SAMD9 targeting guide sequence portion
aagaggccaaaacucagaga

SEQ ID NO: 1113 - RNA, 20 nt, Artificial Sequence
  SAMD9 targeting guide sequence portion
aagcaaaaugaagaggccaa

SEQ ID NO: 1114 - RNA, 20 nt, Artificial Sequence
  SAMD9 targeting guide sequence portion
aauauccagccaccuuucuc

SEQ ID NO: 1115 - RNA, 20 nt, Artificial Sequence
  SAMD9 targeting guide sequence portion
aaugaagaggccaaaacuca

SEQ ID NO: 1116 - RNA, 20 nt, Artificial Sequence
  SAMD9 targeting guide sequence portion
accuuucucugaguuuuggc

SEQ ID NO: 1117 - RNA, 20 nt, Artificial Sequence
  SAMD9 targeting guide sequence portion
acucagagaaagguggcugg

SEQ ID NO: 1118 - RNA, 20 nt, Artificial Sequence
  SAMD9 targeting guide sequence portion
agagaaagguggcuggauau

SEQ ID NO: 1119 - RNA, 20 nt, Artificial Sequence
  SAMD9 targeting guide sequence portion
agaggccaaaacucagagaa

SEQ ID NO: 1120 - RNA, 20 nt, Artificial Sequence
  SAMD9 targeting guide sequence portion
agcaaaaugaagaggccaaa

SEQ ID NO: 1121 - RNA, 20 nt, Artificial Sequence
  SAMD9 targeting guide sequence portion
agccaccuuucucugaguuu

SEQ ID NO: 1122 - RNA, 20 nt, Artificial Sequence
  SAMD9 targeting guide sequence portion
aggccaaaacucagagaaag

SEQ ID NO: 1123 - RNA, 20 nt, Artificial Sequence
  SAMD9 targeting guide sequence portion
auauccagccaccuuucucu

SEQ ID NO: 1124 - RNA, 20 nt, Artificial Sequence
  SAMD9 targeting guide sequence portion
auccagccaccuuucucuga

SEQ ID NO: 1125 - RNA, 20 nt, Artificial Sequence
  SAMD9 targeting guide sequence portion
augaagaggccaaaacucag

SEQ ID NO: 1126 - RNA, 20 nt, Artificial Sequence
  SAMD9 targeting guide sequence portion
caaaacucagagaaaggugg

SEQ ID NO: 1127 - RNA, 20 nt, Artificial Sequence
  SAMD9 targeting guide sequence portion
caaaaugaagaggccaaaac

SEQ ID NO: 1128 - RNA, 20 nt, Artificial Sequence
  SAMD9 targeting guide sequence portion
caccuuucucugaguuuugg

SEQ ID NO: 1129 - RNA, 20 nt, Artificial Sequence
  SAMD9 targeting guide sequence portion
cagagaaagguggcuggaua

SEQ ID NO: 1130 - RNA, 20 nt, Artificial Sequence
  SAMD9 targeting guide sequence portion
cagccaccuuucucugaguu

SEQ ID NO: 1131 - RNA, 20 nt, Artificial Sequence
  SAMD9 targeting guide sequence portion
ccaaaacucagagaaaggug

SEQ ID NO: 1132 - RNA, 20 nt, Artificial Sequence
  SAMD9 targeting guide sequence portion
ccaccuuucucugaguuuug

SEQ ID NO: 1133 - RNA, 20 nt, Artificial Sequence
  SAMD9 targeting guide sequence portion
ccagccaccuuucucugagu

SEQ ID NO: 1134 - RNA, 20 nt, Artificial Sequence
  SAMD9 targeting guide sequence portion
ccuuucucugaguuuuggcc

SEQ ID NO: 1135 - RNA, 20 nt, Artificial Sequence
  SAMD9 targeting guide sequence portion
cucagagaaagguggcugga

SEQ ID NO: 1136 - RNA, 20 nt, Artificial Sequence
  SAMD9 targeting guide sequence portion
cucugaguuuuggccucuuc

SEQ ID NO: 1137 - RNA, 20 nt, Artificial Sequence
  SAMD9 targeting guide sequence portion
cugaguuuuggccucuucau

SEQ ID NO: 1138 - RNA, 20 nt, Artificial Sequence
  SAMD9 targeting guide sequence portion
cuuaaaauauccagccaccu

SEQ ID NO: 1139 - RNA, 20 nt, Artificial Sequence
  SAMD9 targeting guide sequence portion
cuuucucugaguuuuggccu

SEQ ID NO: 1140 - RNA, 20 nt, Artificial Sequence
  SAMD9 targeting guide sequence portion
gaagaggccaaaacucagag

SEQ ID NO: 1141 - RNA, 20 nt, Artificial Sequence
  SAMD9 targeting guide sequence portion
gaggccaaaacucagagaaa

SEQ ID NO: 1142 - RNA, 20 nt, Artificial Sequence
  SAMD9 targeting guide sequence portion
gcaaaaugaagaggccaaaa

SEQ ID NO: 1143 - RNA, 20 nt, Artificial Sequence
  SAMD9 targeting guide sequence portion
gccaaaacucagagaaaggu

SEQ ID NO: 1144 - RNA, 20 nt, Artificial Sequence
  SAMD9 targeting guide sequence portion
gccaccuuucucugaguuuu

SEQ ID NO: 1145 - RNA, 20 nt, Artificial Sequence
  SAMD9 targeting guide sequence portion
ggccaaaacucagagaaagg

SEQ ID NO: 1146 - RNA, 20 nt, Artificial Sequence
  SAMD9 targeting guide sequence portion
uaaaauauccagccaccuuu

SEQ ID NO: 1147 - RNA, 20 nt, Artificial Sequence
  SAMD9 targeting guide sequence portion
uauccagccaccuuucucug

SEQ ID NO: 1148 - RNA, 20 nt, Artificial Sequence
  SAMD9 targeting guide sequence portion
ucagagaaagguggcuggau

SEQ ID NO: 1149 - RNA, 20 nt, Artificial Sequence
  SAMD9 targeting guide sequence portion
uccagccaccuuucucugag

SEQ ID NO: 1150 - RNA, 20 nt, Artificial Sequence
  SAMD9 targeting guide sequence portion
ucucugaguuuuggccucuu

SEQ ID NO: 1151 - RNA, 20 nt, Artificial Sequence
  SAMD9 targeting guide sequence portion
ucugaguuuuggccucuuca

SEQ ID NO: 1152 - RNA, 20 nt, Artificial Sequence
  SAMD9 targeting guide sequence portion
ugaagaggccaaaacucaga

SEQ ID NO: 1153 - RNA, 20 nt, Artificial Sequence
  SAMD9 targeting guide sequence portion
ugaguuuuggccucuucauu

SEQ ID NO: 1154 - RNA, 20 nt, Artificial Sequence
  SAMD9 targeting guide sequence portion
uuaaaauauccagccaccuu

SEQ ID NO: 1155 - RNA, 20 nt, Artificial Sequence
  SAMD9 targeting guide sequence portion
uucucugaguuuuggccucu

SEQ ID NO: 1156 - RNA, 20 nt, Artificial Sequence
  SAMD9 targeting guide sequence portion
uuucucugaguuuuggccuc

SEQ ID NO: 1157 - RNA, 21 nt, Artificial Sequence
  SAMD9 targeting guide sequence portion
aaaacucagagaaagguggcu

SEQ ID NO: 1158 - RNA, 21 nt, Artificial Sequence
  SAMD9 targeting guide sequence portion
aaaauauccagccaccuuucu

SEQ ID NO: 1159 - RNA, 21 nt, Artificial Sequence
  SAMD9 targeting guide sequence portion
aaaaugaagaggccaaaacuc

SEQ ID NO: 1160 - RNA, 21 nt, Artificial Sequence
  SAMD9 targeting guide sequence portion
aaacucagagaaagguggcug

SEQ ID NO: 1161 - RNA, 21 nt, Artificial Sequence
  SAMD9 targeting guide sequence portion
aaauauccagccaccuuucuc

SEQ ID NO: 1162 - RNA, 21 nt, Artificial Sequence
  SAMD9 targeting guide sequence portion
aaaugaagaggccaaaacuca

SEQ ID NO: 1163 - RNA, 21 nt, Artificial Sequence
  SAMD9 targeting guide sequence portion
aacucagagaaagguggcugg

SEQ ID NO: 1164 - RNA, 21 nt, Artificial Sequence
  SAMD9 targeting guide sequence portion
aagaggccaaaacucagagaa

SEQ ID NO: 1165 - RNA, 21 nt, Artificial Sequence
  SAMD9 targeting guide sequence portion
aagcaaaaugaagaggccaaa

SEQ ID NO: 1166 - RNA, 21 nt, Artificial Sequence
  SAMD9 targeting guide sequence portion
aauauccagccaccuuucucu

SEQ ID NO: 1167 - RNA, 21 nt, Artificial Sequence
  SAMD9 targeting guide sequence portion
aaugaagaggccaaaacucag

SEQ ID NO: 1168 - RNA, 21 nt, Artificial Sequence
  SAMD9 targeting guide sequence portion
accuuucucugaguuuuggcc

SEQ ID NO: 1169 - RNA, 21 nt, Artificial Sequence
  SAMD9 targeting guide sequence portion
acucagagaaagguggcugga

SEQ ID NO: 1170 - RNA, 21 nt, Artificial Sequence
  SAMD9 targeting guide sequence portion
agagaaagguggcuggauauu

SEQ ID NO: 1171 - RNA, 21 nt, Artificial Sequence
  SAMD9 targeting guide sequence portion
agaggccaaaacucagagaaa

SEQ ID NO: 1172 - RNA, 21 nt, Artificial Sequence
  SAMD9 targeting guide sequence portion
agcaaaaugaagaggccaaaa

SEQ ID NO: 1173 - RNA, 21 nt, Artificial Sequence
  SAMD9 targeting guide sequence portion
agccaccuuucucugaguuuu

SEQ ID NO: 1174 - RNA, 21 nt, Artificial Sequence
  SAMD9 targeting guide sequence portion
aggccaaaacucagagaaagg

SEQ ID NO: 1175 - RNA, 21 nt, Artificial Sequence
  SAMD9 targeting guide sequence portion
auauccagccaccuuucucug

SEQ ID NO: 1176 - RNA, 21 nt, Artificial Sequence
  SAMD9 targeting guide sequence portion
auccagccaccuuucucugag

SEQ ID NO: 1177 - RNA, 21 nt, Artificial Sequence
  SAMD9 targeting guide sequence portion
augaagaggccaaaacucaga

SEQ ID NO: 1178 - RNA, 21 nt, Artificial Sequence
  SAMD9 targeting guide sequence portion
caaaacucagagaaagguggc

SEQ ID NO: 1179 - RNA, 21 nt, Artificial Sequence
  SAMD9 targeting guide sequence portion
caaaaugaagaggccaaaacu

SEQ ID NO: 1180 - RNA, 21 nt, Artificial Sequence
  SAMD9 targeting guide sequence portion
caccuuucucugaguuuuggc

SEQ ID NO: 1181 - RNA, 21 nt, Artificial Sequence
  SAMD9 targeting guide sequence portion
cagagaaagguggcuggauau

SEQ ID NO: 1182 - RNA, 21 nt, Artificial Sequence
  SAMD9 targeting guide sequence portion
cagccaccuuucucugaguuu

SEQ ID NO: 1183 - RNA, 21 nt, Artificial Sequence
  SAMD9 targeting guide sequence portion
ccaaaacucagagaaaggugg

SEQ ID NO: 1184 - RNA, 21 nt, Artificial Sequence
  SAMD9 targeting guide sequence portion
ccaccuuucucugaguuuugg

SEQ ID NO: 1185 - RNA, 21 nt, Artificial Sequence
  SAMD9 targeting guide sequence portion
ccagccaccuuucucugaguu

SEQ ID NO: 1186 - RNA, 21 nt, Artificial Sequence
  SAMD9 targeting guide sequence portion
ccuuucucugaguuuuggccu

SEQ ID NO: 1187 - RNA, 21 nt, Artificial Sequence
  SAMD9 targeting guide sequence portion
cucagagaaagguggcuggau

SEQ ID NO: 1188 - RNA, 21 nt, Artificial Sequence
  SAMD9 targeting guide sequence portion
cucugaguuuuggccucuuca

SEQ ID NO: 1189 - RNA, 21 nt, Artificial Sequence
  SAMD9 targeting guide sequence portion
cugaguuuuggccucuucauu

SEQ ID NO: 1190 - RNA, 21 nt, Artificial Sequence
  SAMD9 targeting guide sequence portion
cuuaaaauauccagccaccuu

SEQ ID NO: 1191 - RNA, 21 nt, Artificial Sequence
  SAMD9 targeting guide sequence portion
cuuucucugaguuuuggccuc

SEQ ID NO: 1192 - RNA, 21 nt, Artificial Sequence
  SAMD9 targeting guide sequence portion
gaagaggccaaaacucagaga

SEQ ID NO: 1193 - RNA, 21 nt, Artificial Sequence
  SAMD9 targeting guide sequence portion
gaggccaaaacucagagaaag

SEQ ID NO: 1194 - RNA, 21 nt, Artificial Sequence
  SAMD9 targeting guide sequence portion
gcaaaaugaagaggccaaaac

SEQ ID NO: 1195 - RNA, 21 nt, Artificial Sequence
  SAMD9 targeting guide sequence portion
gccaaaacucagagaaaggug

SEQ ID NO: 1196 - RNA, 21 nt, Artificial Sequence
  SAMD9 targeting guide sequence portion
gccaccuuucucugaguuuug

SEQ ID NO: 1197 - RNA, 21 nt, Artificial Sequence
  SAMD9 targeting guide sequence portion
ggccaaaacucagagaaaggu

SEQ ID NO: 1198 - RNA, 21 nt, Artificial Sequence
  SAMD9 targeting guide sequence portion
uaaaauauccagccaccuuuc

SEQ ID NO: 1199 - RNA, 21 nt, Artificial Sequence
  SAMD9 targeting guide sequence portion
uaagcaaaaugaagaggccaa

SEQ ID NO: 1200 - RNA, 21 nt, Artificial Sequence
  SAMD9 targeting guide sequence portion
uauccagccaccuuucucuga

SEQ ID NO: 1201 - RNA, 21 nt, Artificial Sequence
  SAMD9 targeting guide sequence portion
ucagagaaagguggcuggaua

SEQ ID NO: 1202 - RNA, 21 nt, Artificial Sequence
  SAMD9 targeting guide sequence portion
uccagccaccuuucucugagu

SEQ ID NO: 1203 - RNA, 21 nt, Artificial Sequence
  SAMD9 targeting guide sequence portion
ucucugaguuuuggccucuuc

SEQ ID NO: 1204 - RNA, 21 nt, Artificial Sequence
  SAMD9 targeting guide sequence portion
ucugaguuuuggccucuucau

SEQ ID NO: 1205 - RNA, 21 nt, Artificial Sequence
  SAMD9 targeting guide sequence portion
ucuuaaaauauccagccaccu

SEQ ID NO: 1206 - RNA, 21 nt, Artificial Sequence
  SAMD9 targeting guide sequence portion
ugaagaggccaaaacucagag

SEQ ID NO: 1207 - RNA, 21 nt, Artificial Sequence
  SAMD9 targeting guide sequence portion
ugaguuuuggccucuucauuu

SEQ ID NO: 1208 - RNA, 21 nt, Artificial Sequence
  SAMD9 targeting guide sequence portion
uuaaaauauccagccaccuuu

SEQ ID NO: 1209 - RNA, 21 nt, Artificial Sequence
  SAMD9 targeting guide sequence portion
uucucugaguuuuggccucuu

SEQ ID NO: 1210 - RNA, 21 nt, Artificial Sequence
  SAMD9 targeting guide sequence portion
uuucucugaguuuuggccucu

SEQ ID NO: 1211 - RNA, 22 nt, Artificial Sequence
  SAMD9 targeting guide sequence portion
aaaacucagagaaagguggcug

SEQ ID NO: 1212 - RNA, 22 nt, Artificial Sequence
  SAMD9 targeting guide sequence portion
aaaauauccagccaccuuucuc

SEQ ID NO: 1213 - RNA, 22 nt, Artificial Sequence
  SAMD9 targeting guide sequence portion
aaaaugaagaggccaaaacuca

SEQ ID NO: 1214 - RNA, 22 nt, Artificial Sequence
  SAMD9 targeting guide sequence portion
aaacucagagaaagguggcugg

SEQ ID NO: 1215 - RNA, 22 nt, Artificial Sequence
  SAMD9 targeting guide sequence portion
aaauauccagccaccuuucucu

SEQ ID NO: 1216 - RNA, 22 nt, Artificial Sequence
  SAMD9 targeting guide sequence portion
aaaugaagaggccaaaacucag

SEQ ID NO: 1217 - RNA, 22 nt, Artificial Sequence
  SAMD9 targeting guide sequence portion
aacucagagaaagguggcugga

SEQ ID NO: 1218 - RNA, 22 nt, Artificial Sequence
  SAMD9 targeting guide sequence portion
aagaggccaaaacucagagaaa

SEQ ID NO: 1219 - RNA, 22 nt, Artificial Sequence
  SAMD9 targeting guide sequence portion
aagcaaaaugaagaggccaaaa

SEQ ID NO: 1220 - RNA, 22 nt, Artificial Sequence
  SAMD9 targeting guide sequence portion
aauauccagccaccuuucucug

SEQ ID NO: 1221 - RNA, 22 nt, Artificial Sequence
  SAMD9 targeting guide sequence portion
aaugaagaggccaaaacucaga

SEQ ID NO: 1222 - RNA, 22 nt, Artificial Sequence
  SAMD9 targeting guide sequence portion
accuuucucugaguuuuggccu

SEQ ID NO: 1223 - RNA, 22 nt, Artificial Sequence
  SAMD9 targeting guide sequence portion
acucagagaaagguggcuggau

SEQ ID NO: 1224 - RNA, 22 nt, Artificial Sequence
  SAMD9 targeting guide sequence portion
agagaaagguggcuggauauuu

SEQ ID NO: 1225 - RNA, 22 nt, Artificial Sequence
  SAMD9 targeting guide sequence portion
agaggccaaaacucagagaaag

SEQ ID NO: 1226 - RNA, 22 nt, Artificial Sequence
  SAMD9 targeting guide sequence portion
agcaaaaugaagaggccaaaac

SEQ ID NO: 1227 - RNA, 22 nt, Artificial Sequence
  SAMD9 targeting guide sequence portion
agccaccuuucucugaguuuug

SEQ ID NO: 1228 - RNA, 22 nt, Artificial Sequence
  SAMD9 targeting guide sequence portion
aggccaaaacucagagaaaggu

SEQ ID NO: 1229 - RNA, 22 nt, Artificial Sequence
  SAMD9 targeting guide sequence portion
auauccagccaccuuucucuga

SEQ ID NO: 1230 - RNA, 22 nt, Artificial Sequence
  SAMD9 targeting guide sequence portion
auccagccaccuuucucugagu

SEQ ID NO: 1231 - RNA, 22 nt, Artificial Sequence
  SAMD9 targeting guide sequence portion
augaagaggccaaaacucagag

SEQ ID NO: 1232 - RNA, 22 nt, Artificial Sequence
  SAMD9 targeting guide sequence portion
caaaacucagagaaagguggcu

SEQ ID NO: 1233 - RNA, 22 nt, Artificial Sequence
  SAMD9 targeting guide sequence portion
caaaaugaagaggccaaaacuc

SEQ ID NO: 1234 - RNA, 22 nt, Artificial Sequence
  SAMD9 targeting guide sequence portion
caccuuucucugaguuuuggcc

SEQ ID NO: 1235 - RNA, 22 nt, Artificial Sequence
  SAMD9 targeting guide sequence portion
cagagaaagguggcuggauauu

SEQ ID NO: 1236 - RNA, 22 nt, Artificial Sequence
  SAMD9 targeting guide sequence portion
cagccaccuuucucugaguuuu

SEQ ID NO: 1237 - RNA, 22 nt, Artificial Sequence
  SAMD9 targeting guide sequence portion
ccaaaacucagagaaagguggc

SEQ ID NO: 1238 - RNA, 22 nt, Artificial Sequence
  SAMD9 targeting guide sequence portion
ccaccuuucucugaguuuuggc

SEQ ID NO: 1239 - RNA, 22 nt, Artificial Sequence
  SAMD9 targeting guide sequence portion
ccagccaccuuucucugaguuu

SEQ ID NO: 1240 - RNA, 22 nt, Artificial Sequence
  SAMD9 targeting guide sequence portion
ccuuucucugaguuuuggccuc

SEQ ID NO: 1241 - RNA, 22 nt, Artificial Sequence
  SAMD9 targeting guide sequence portion
cucagagaaagguggcuggaua

SEQ ID NO: 1242 - RNA, 22 nt, Artificial Sequence
  SAMD9 targeting guide sequence portion
cucugaguuuuggccucuucau

SEQ ID NO: 1243 - RNA, 22 nt, Artificial Sequence
  SAMD9 targeting guide sequence portion
cugaguuuuggccucuucauuu

SEQ ID NO: 1244 - RNA, 22 nt, Artificial Sequence
  SAMD9 targeting guide sequence portion
cuuaaaauauccagccaccuuu

SEQ ID NO: 1245 - RNA, 22 nt, Artificial Sequence
  SAMD9 targeting guide sequence portion
cuuucucugaguuuuggccucu

SEQ ID NO: 1246 - RNA, 22 nt, Artificial Sequence
  SAMD9 targeting guide sequence portion
gaagaggccaaaacucagagaa

SEQ ID NO: 1247 - RNA, 22 nt, Artificial Sequence
  SAMD9 targeting guide sequence portion
gaggccaaaacucagagaaagg

SEQ ID NO: 1248 - RNA, 22 nt, Artificial Sequence
  SAMD9 targeting guide sequence portion
gcaaaaugaagaggccaaaacu

SEQ ID NO: 1249 - RNA, 22 nt, Artificial Sequence
  SAMD9 targeting guide sequence portion
gccaaaacucagagaaaggugg

SEQ ID NO: 1250 - RNA, 22 nt, Artificial Sequence
  SAMD9 targeting guide sequence portion
gccaccuuucucugaguuuugg

SEQ ID NO: 1251 - RNA, 22 nt, Artificial Sequence
  SAMD9 targeting guide sequence portion
ggccaaaacucagagaaaggug

SEQ ID NO: 1252 - RNA, 22 nt, Artificial Sequence
  SAMD9 targeting guide sequence portion
uaaaauauccagccaccuuucu

SEQ ID NO: 1253 - RNA, 22 nt, Artificial Sequence
  SAMD9 targeting guide sequence portion
uaagcaaaaugaagaggccaaa

SEQ ID NO: 1254 - RNA, 22 nt, Artificial Sequence
  SAMD9 targeting guide sequence portion
uauccagccaccuuucucugag

SEQ ID NO: 1255 - RNA, 22 nt, Artificial Sequence
  SAMD9 targeting guide sequence portion
ucagagaaagguggcuggauau

SEQ ID NO: 1256 - RNA, 22 nt, Artificial Sequence
  SAMD9 targeting guide sequence portion
uccagccaccuuucucugaguu

SEQ ID NO: 1257 - RNA, 22 nt, Artificial Sequence
  SAMD9 targeting guide sequence portion
ucucugaguuuuggccucuuca

SEQ ID NO: 1258 - RNA, 22 nt, Artificial Sequence
  SAMD9 targeting guide sequence portion
ucugaguuuuggccucuucauu

SEQ ID NO: 1259 - RNA, 22 nt, Artificial Sequence
  SAMD9 targeting guide sequence portion
ucuuaaaauauccagccaccuu

SEQ ID NO: 1260 - RNA, 22 nt, Artificial Sequence
  SAMD9 targeting guide sequence portion
ugaagaggccaaaacucagaga

SEQ ID NO: 1261 - RNA, 22 nt, Artificial Sequence
  SAMD9 targeting guide sequence portion
ugaguuuuggccucuucauuuu

SEQ ID NO: 1262 - RNA, 22 nt, Artificial Sequence
  SAMD9 targeting guide sequence portion
uuaaaauauccagccaccuuuc

SEQ ID NO: 1263 - RNA, 22 nt, Artificial Sequence
  SAMD9 targeting guide sequence portion
uuaagcaaaaugaagaggccaa

SEQ ID NO: 1264 - RNA, 22 nt, Artificial Sequence
  SAMD9 targeting guide sequence portion
uucucugaguuuuggccucuuc

SEQ ID NO: 1265 - RNA, 22 nt, Artificial Sequence
  SAMD9 targeting guide sequence portion
uucuuaaaauauccagccaccu

SEQ ID NO: 1266 - RNA, 22 nt, Artificial Sequence
  SAMD9 targeting guide sequence portion
uuucucugaguuuuggccucuu

SEQ ID NO: 1267 - RNA, 20 nt, Artificial Sequence
  SAMD9 targeting guide sequence portion
aaaacuuggagaaagguggc

SEQ ID NO: 1268 - RNA, 20 nt, Artificial Sequence
  SAMD9 targeting guide sequence portion
aaacuuggagaaagguggcu

SEQ ID NO: 1269 - RNA, 20 nt, Artificial Sequence
  SAMD9 targeting guide sequence portion
aaaugaagaggccaaaacuu

SEQ ID NO: 1270 - RNA, 20 nt, Artificial Sequence
  SAMD9 targeting guide sequence portion
aacuuggagaaagguggcug

SEQ ID NO: 1271 - RNA, 20 nt, Artificial Sequence
  SAMD9 targeting guide sequence portion
aagaggccaaaacuuggaga

SEQ ID NO: 1272 - RNA, 20 nt, Artificial Sequence
  SAMD9 targeting guide sequence portion
aaguuuuggccucuucauuu

SEQ ID NO: 1273 - RNA, 20 nt, Artificial Sequence
  SAMD9 targeting guide sequence portion
aaugaagaggccaaaacuug

SEQ ID NO: 1274 - RNA, 20 nt, Artificial Sequence
  SAMD9 targeting guide sequence portion
accuuucuccaaguuuuggc

SEQ ID NO: 1275 - RNA, 20 nt, Artificial Sequence
  SAMD9 targeting guide sequence portion
acuuggagaaagguggcugg

SEQ ID NO: 1276 - RNA, 20 nt, Artificial Sequence
  SAMD9 targeting guide sequence portion
agaggccaaaacuuggagaa

SEQ ID NO: 1277 - RNA, 20 nt, Artificial Sequence
  SAMD9 targeting guide sequence portion
agccaccuuucuccaaguuu

SEQ ID NO: 1278 - RNA, 20 nt, Artificial Sequence
  SAMD9 targeting guide sequence portion
aggccaaaacuuggagaaag

SEQ ID NO: 1279 - RNA, 20 nt, Artificial Sequence
  SAMD9 targeting guide sequence portion
auauccagccaccuuucucc

SEQ ID NO: 1280 - RNA, 20 nt, Artificial Sequence
  SAMD9 targeting guide sequence portion
auccagccaccuuucuccaa

SEQ ID NO: 1281 - RNA, 20 nt, Artificial Sequence
  SAMD9 targeting guide sequence portion
augaagaggccaaaacuugg

SEQ ID NO: 1282 - RNA, 20 nt, Artificial Sequence
  SAMD9 targeting guide sequence portion
caaaacuuggagaaaggugg

SEQ ID NO: 1283 - RNA, 20 nt, Artificial Sequence
  SAMD9 targeting guide sequence portion
caaguuuuggccucuucauu

SEQ ID NO: 1284 - RNA, 20 nt, Artificial Sequence
  SAMD9 targeting guide sequence portion
caccuuucuccaaguuuugg

SEQ ID NO: 1285 - RNA, 20 nt, Artificial Sequence
  SAMD9 targeting guide sequence portion
cagccaccuuucuccaaguu

SEQ ID NO: 1286 - RNA, 20 nt, Artificial Sequence
  SAMD9 targeting guide sequence portion
ccaaaacuuggagaaaggug

SEQ ID NO: 1287 - RNA, 20 nt, Artificial Sequence
  SAMD9 targeting guide sequence portion
ccaaguuuuggccucuucau

SEQ ID NO: 1288 - RNA, 20 nt, Artificial Sequence
  SAMD9 targeting guide sequence portion
ccaccuuucuccaaguuuug

SEQ ID NO: 1289 - RNA, 20 nt, Artificial Sequence
  SAMD9 targeting guide sequence portion
ccagccaccuuucuccaagu

SEQ ID NO: 1290 - RNA, 20 nt, Artificial Sequence
  SAMD9 targeting guide sequence portion
ccuuucuccaaguuuuggcc

SEQ ID NO: 1291 - RNA, 20 nt, Artificial Sequence
  SAMD9 targeting guide sequence portion
cuccaaguuuuggccucuuc

SEQ ID NO: 1292 - RNA, 20 nt, Artificial Sequence
  SAMD9 targeting guide sequence portion
cuuggagaaagguggcugga

SEQ ID NO: 1293 - RNA, 20 nt, Artificial Sequence
  SAMD9 targeting guide sequence portion
cuuucuccaaguuuuggccu

SEQ ID NO: 1294 - RNA, 20 nt, Artificial Sequence
  SAMD9 targeting guide sequence portion
gaagaggccaaaacuuggag

SEQ ID NO: 1295 - RNA, 20 nt, Artificial Sequence
  SAMD9 targeting guide sequence portion
gaggccaaaacuuggagaaa

SEQ ID NO: 1296 - RNA, 20 nt, Artificial Sequence
  SAMD9 targeting guide sequence portion
gccaaaacuuggagaaaggu

SEQ ID NO: 1297 - RNA, 20 nt, Artificial Sequence
  SAMD9 targeting guide sequence portion
gccaccuuucuccaaguuuu

SEQ ID NO: 1298 - RNA, 20 nt, Artificial Sequence
  SAMD9 targeting guide sequence portion
ggccaaaacuuggagaaagg

SEQ ID NO: 1299 - RNA, 20 nt, Artificial Sequence
  SAMD9 targeting guide sequence portion
uaagcaaaaugaagaggcca

SEQ ID NO: 1300 - RNA, 20 nt, Artificial Sequence
  SAMD9 targeting guide sequence portion
uauccagccaccuuucucca

SEQ ID NO: 1301 - RNA, 20 nt, Artificial Sequence
  SAMD9 targeting guide sequence portion
uccaaguuuuggccucuuca

SEQ ID NO: 1302 - RNA, 20 nt, Artificial Sequence
  SAMD9 targeting guide sequence portion
uccagccaccuuucuccaag

SEQ ID NO: 1303 - RNA, 20 nt, Artificial Sequence
  SAMD9 targeting guide sequence portion
ucuccaaguuuuggccucuu

SEQ ID NO: 1304 - RNA, 20 nt, Artificial Sequence
  SAMD9 targeting guide sequence portion
ugaagaggccaaaacuugga

SEQ ID NO: 1305 - RNA, 20 nt, Artificial Sequence
  SAMD9 targeting guide sequence portion
uggagaaagguggcuggaua

SEQ ID NO: 1306 - RNA, 20 nt, Artificial Sequence
  SAMD9 targeting guide sequence portion
uucuccaaguuuuggccucu

SEQ ID NO: 1307 - RNA, 20 nt, Artificial Sequence
  SAMD9 targeting guide sequence portion
uuggagaaagguggcuggau

SEQ ID NO: 1308 - RNA, 20 nt, Artificial Sequence
  SAMD9 targeting guide sequence portion
uuucuccaaguuuuggccuc

SEQ ID NO: 1309 - RNA, 21 nt, Artificial Sequence
  SAMD9 targeting guide sequence portion
aaaacuuggagaaagguggcu

SEQ ID NO: 1310 - RNA, 21 nt, Artificial Sequence
  SAMD9 targeting guide sequence portion
aaaaugaagaggccaaaacuu

SEQ ID NO: 1311 - RNA, 21 nt, Artificial Sequence
  SAMD9 targeting guide sequence portion
aaacuuggagaaagguggcug

SEQ ID NO: 1312 - RNA, 21 nt, Artificial Sequence
  SAMD9 targeting guide sequence portion
aaaugaagaggccaaaacuug

SEQ ID NO: 1313 - RNA, 21 nt, Artificial Sequence
  SAMD9 targeting guide sequence portion
aacuuggagaaagguggcugg

SEQ ID NO: 1314 - RNA, 21 nt, Artificial Sequence
  SAMD9 targeting guide sequence portion
aagaggccaaaacuuggagaa

SEQ ID NO: 1315 - RNA, 21 nt, Artificial Sequence
  SAMD9 targeting guide sequence portion
aaguuuuggccucuucauuuu

SEQ ID NO: 1316 - RNA, 21 nt, Artificial Sequence
  SAMD9 targeting guide sequence portion
aauauccagccaccuuucucc

SEQ ID NO: 1317 - RNA, 21 nt, Artificial Sequence
  SAMD9 targeting guide sequence portion
aaugaagaggccaaaacuugg

SEQ ID NO: 1318 - RNA, 21 nt, Artificial Sequence
  SAMD9 targeting guide sequence portion
accuuucuccaaguuuuggcc

SEQ ID NO: 1319 - RNA, 21 nt, Artificial Sequence
  SAMD9 targeting guide sequence portion
acuuggagaaagguggcugga

SEQ ID NO: 1320 - RNA, 21 nt, Artificial Sequence
  SAMD9 targeting guide sequence portion
agaggccaaaacuuggagaaa

SEQ ID NO: 1321 - RNA, 21 nt, Artificial Sequence
  SAMD9 targeting guide sequence portion
agccaccuuucuccaaguuuu

SEQ ID NO: 1322 - RNA, 21 nt, Artificial Sequence
  SAMD9 targeting guide sequence portion
aggccaaaacuuggagaaagg

SEQ ID NO: 1323 - RNA, 21 nt, Artificial Sequence
  SAMD9 targeting guide sequence portion
auauccagccaccuuucucca

SEQ ID NO: 1324 - RNA, 21 nt, Artificial Sequence
  SAMD9 targeting guide sequence portion
auccagccaccuuucuccaag

SEQ ID NO: 1325 - RNA, 21 nt, Artificial Sequence
  SAMD9 targeting guide sequence portion
augaagaggccaaaacuugga

SEQ ID NO: 1326 - RNA, 21 nt, Artificial Sequence
  SAMD9 targeting guide sequence portion
caaaacuuggagaaagguggc

SEQ ID NO: 1327 - RNA, 21 nt, Artificial Sequence
  SAMD9 targeting guide sequence portion
caaguuuuggccucuucauuu

SEQ ID NO: 1328 - RNA, 21 nt, Artificial Sequence
  SAMD9 targeting guide sequence portion
caccuuucuccaaguuuuggc

SEQ ID NO: 1329 - RNA, 21 nt, Artificial Sequence
  SAMD9 targeting guide sequence portion
cagccaccuuucuccaaguuu

SEQ ID NO: 1330 - RNA, 21 nt, Artificial Sequence
  SAMD9 targeting guide sequence portion
ccaaaacuuggagaaaggugg

SEQ ID NO: 1331 - RNA, 21 nt, Artificial Sequence
  SAMD9 targeting guide sequence portion
ccaaguuuuggccucuucauu

SEQ ID NO: 1332 - RNA, 21 nt, Artificial Sequence
  SAMD9 targeting guide sequence portion
ccaccuuucuccaaguuuugg

SEQ ID NO: 1333 - RNA, 21 nt, Artificial Sequence
  SAMD9 targeting guide sequence portion
ccagccaccuuucuccaaguu

SEQ ID NO: 1334 - RNA, 21 nt, Artificial Sequence
  SAMD9 targeting guide sequence portion
ccuuucuccaaguuuuggccu

SEQ ID NO: 1335 - RNA, 21 nt, Artificial Sequence
  SAMD9 targeting guide sequence portion
cuccaaguuuuggccucuuca

SEQ ID NO: 1336 - RNA, 21 nt, Artificial Sequence
  SAMD9 targeting guide sequence portion
cuuggagaaagguggcuggau

SEQ ID NO: 1337 - RNA, 21 nt, Artificial Sequence
  SAMD9 targeting guide sequence portion
cuuucuccaaguuuuggccuc

SEQ ID NO: 1338 - RNA, 21 nt, Artificial Sequence
  SAMD9 targeting guide sequence portion
gaagaggccaaaacuuggaga

SEQ ID NO: 1339 - RNA, 21 nt, Artificial Sequence
  SAMD9 targeting guide sequence portion
gaggccaaaacuuggagaaag

SEQ ID NO: 1340 - RNA, 21 nt, Artificial Sequence
  SAMD9 targeting guide sequence portion
gccaaaacuuggagaaaggug

SEQ ID NO: 1341 - RNA, 21 nt, Artificial Sequence
  SAMD9 targeting guide sequence portion
gccaccuuucuccaaguuuug

SEQ ID NO: 1342 - RNA, 21 nt, Artificial Sequence
  SAMD9 targeting guide sequence portion
ggccaaaacuuggagaaaggu

SEQ ID NO: 1343 - RNA, 21 nt, Artificial Sequence
  SAMD9 targeting guide sequence portion
uauccagccaccuuucuccaa

SEQ ID NO: 1344 - RNA, 21 nt, Artificial Sequence
  SAMD9 targeting guide sequence portion
uccaaguuuuggccucuucau

SEQ ID NO: 1345 - RNA, 21 nt, Artificial Sequence
  SAMD9 targeting guide sequence portion
uccagccaccuuucuccaagu

SEQ ID NO: 1346 - RNA, 21 nt, Artificial Sequence
  SAMD9 targeting guide sequence portion
ucuccaaguuuuggccucuuc

SEQ ID NO: 1347 - RNA, 21 nt, Artificial Sequence
  SAMD9 targeting guide sequence portion
ugaagaggccaaaacuuggag

SEQ ID NO: 1348 - RNA, 21 nt, Artificial Sequence
  SAMD9 targeting guide sequence portion
uggagaaagguggcuggauau

SEQ ID NO: 1349 - RNA, 21 nt, Artificial Sequence
  SAMD9 targeting guide sequence portion
uuaagcaaaaugaagaggcca

SEQ ID NO: 1350 - RNA, 21 nt, Artificial Sequence
  SAMD9 targeting guide sequence portion
uucuccaaguuuuggccucuu

SEQ ID NO: 1351 - RNA, 21 nt, Artificial Sequence
  SAMD9 targeting guide sequence portion
uuggagaaagguggcuggaua

SEQ ID NO: 1352 - RNA, 21 nt, Artificial Sequence
  SAMD9 targeting guide sequence portion
uuucuccaaguuuuggccucu

SEQ ID NO: 1353 - RNA, 22 nt, Artificial Sequence
  SAMD9 targeting guide sequence portion
aaaacuuggagaaagguggcug

SEQ ID NO: 1354 - RNA, 22 nt, Artificial Sequence
  SAMD9 targeting guide sequence portion
aaaaugaagaggccaaaacuug

SEQ ID NO: 1355 - RNA, 22 nt, Artificial Sequence
  SAMD9 targeting guide sequence portion
aaacuuggagaaagguggcugg

SEQ ID NO: 1356 - RNA, 22 nt, Artificial Sequence
  SAMD9 targeting guide sequence portion
aaauauccagccaccuuucucc

SEQ ID NO: 1357 - RNA, 22 nt, Artificial Sequence
  SAMD9 targeting guide sequence portion
aaaugaagaggccaaaacuugg

SEQ ID NO: 1358 - RNA, 22 nt, Artificial Sequence
  SAMD9 targeting guide sequence portion
aacuuggagaaagguggcugga

SEQ ID NO: 1359 - RNA, 22 nt, Artificial Sequence
  SAMD9 targeting guide sequence portion
aagaggccaaaacuuggagaaa

SEQ ID NO: 1360 - RNA, 22 nt, Artificial Sequence
  SAMD9 targeting guide sequence portion
aaguuuuggccucuucauuuug

SEQ ID NO: 1361 - RNA, 22 nt, Artificial Sequence
  SAMD9 targeting guide sequence portion
aauauccagccaccuuucucca

SEQ ID NO: 1362 - RNA, 22 nt, Artificial Sequence
  SAMD9 targeting guide sequence portion
aaugaagaggccaaaacuugga

SEQ ID NO: 1363 - RNA, 22 nt, Artificial Sequence
  SAMD9 targeting guide sequence portion
accuuucuccaaguuuuggccu

SEQ ID NO: 1364 - RNA, 22 nt, Artificial Sequence
  SAMD9 targeting guide sequence portion
acuuggagaaagguggcuggau

SEQ ID NO: 1365 - RNA, 22 nt, Artificial Sequence
  SAMD9 targeting guide sequence portion
agaggccaaaacuuggagaaag

SEQ ID NO: 1366 - RNA, 22 nt, Artificial Sequence
  SAMD9 targeting guide sequence portion
agccaccuuucuccaaguuuug

SEQ ID NO: 1367 - RNA, 22 nt, Artificial Sequence
  SAMD9 targeting guide sequence portion
aggccaaaacuuggagaaaggu

SEQ ID NO: 1368 - RNA, 22 nt, Artificial Sequence
  SAMD9 targeting guide sequence portion
auauccagccaccuuucuccaa

SEQ ID NO: 1369 - RNA, 22 nt, Artificial Sequence
  SAMD9 targeting guide sequence portion
auccagccaccuuucuccaagu

SEQ ID NO: 1370 - RNA, 22 nt, Artificial Sequence
  SAMD9 targeting guide sequence portion
augaagaggccaaaacuuggag

SEQ ID NO: 1371 - RNA, 22 nt, Artificial Sequence
  SAMD9 targeting guide sequence portion
auuaagcaaaaugaagaggcca

SEQ ID NO: 1372 - RNA, 22 nt, Artificial Sequence
  SAMD9 targeting guide sequence portion
caaaacuuggagaaagguggcu

SEQ ID NO: 1373 - RNA, 22 nt, Artificial Sequence
  SAMD9 targeting guide sequence portion
caaaaugaagaggccaaaacuu

SEQ ID NO: 1374 - RNA, 22 nt, Artificial Sequence
  SAMD9 targeting guide sequence portion
caaguuuuggccucuucauuuu

SEQ ID NO: 1375 - RNA, 22 nt, Artificial Sequence
  SAMD9 targeting guide sequence portion
caccuuucuccaaguuuuggcc

SEQ ID NO: 1376 - RNA, 22 nt, Artificial Sequence
  SAMD9 targeting guide sequence portion
cagccaccuuucuccaaguuuu

SEQ ID NO: 1377 - RNA, 22 nt, Artificial Sequence
  SAMD9 targeting guide sequence portion
ccaaaacuuggagaaagguggc

SEQ ID NO: 1378 - RNA, 22 nt, Artificial Sequence
  SAMD9 targeting guide sequence portion
ccaaguuuuggccucuucauuu

SEQ ID NO: 1379 - RNA, 22 nt, Artificial Sequence
  SAMD9 targeting guide sequence portion
ccaccuuucuccaaguuuuggc

SEQ ID NO: 1380 - RNA, 22 nt, Artificial Sequence
  SAMD9 targeting guide sequence portion
ccagccaccuuucuccaaguuu

SEQ ID NO: 1381 - RNA, 22 nt, Artificial Sequence
  SAMD9 targeting guide sequence portion
ccuuucuccaaguuuuggccuc

SEQ ID NO: 1382 - RNA, 22 nt, Artificial Sequence
  SAMD9 targeting guide sequence portion
cuccaaguuuuggccucuucau

SEQ ID NO: 1383 - RNA, 22 nt, Artificial Sequence
  SAMD9 targeting guide sequence portion
cuuggagaaagguggcuggaua

SEQ ID NO: 1384 - RNA, 22 nt, Artificial Sequence
  SAMD9 targeting guide sequence portion
cuuucuccaaguuuuggccucu

SEQ ID NO: 1385 - RNA, 22 nt, Artificial Sequence
  SAMD9 targeting guide sequence portion
gaagaggccaaaacuuggagaa

SEQ ID NO: 1386 - RNA, 22 nt, Artificial Sequence
  SAMD9 targeting guide sequence portion
gaggccaaaacuuggagaaagg

SEQ ID NO: 1387 - RNA, 22 nt, Artificial Sequence
  SAMD9 targeting guide sequence portion
gccaaaacuuggagaaaggugg

SEQ ID NO: 1388 - RNA, 22 nt, Artificial Sequence
  SAMD9 targeting guide sequence portion
gccaccuuucuccaaguuuugg

SEQ ID NO: 1389 - RNA, 22 nt, Artificial Sequence
  SAMD9 targeting guide sequence portion
ggccaaaacuuggagaaaggug

SEQ ID NO: 1390 - RNA, 22 nt, Artificial Sequence
  SAMD9 targeting guide sequence portion
uauccagccaccuuucuccaag

SEQ ID NO: 1391 - RNA, 22 nt, Artificial Sequence
  SAMD9 targeting guide sequence portion
uccaaguuuuggccucuucauu

SEQ ID NO: 1392 - RNA, 22 nt, Artificial Sequence
  SAMD9 targeting guide sequence portion
uccagccaccuuucuccaaguu

SEQ ID NO: 1393 - RNA, 22 nt, Artificial Sequence
  SAMD9 targeting guide sequence portion
ucuccaaguuuuggccucuuca

SEQ ID NO: 1394 - RNA, 22 nt, Artificial Sequence
  SAMD9 targeting guide sequence portion
ugaagaggccaaaacuuggaga

SEQ ID NO: 1395 - RNA, 22 nt, Artificial Sequence
  SAMD9 targeting guide sequence portion
uggagaaagguggcuggauauu

SEQ ID NO: 1396 - RNA, 22 nt, Artificial Sequence
  SAMD9 targeting guide sequence portion
uucuccaaguuuuggccucuuc

SEQ ID NO: 1397 - RNA, 22 nt, Artificial Sequence
  SAMD9 targeting guide sequence portion
uuggagaaagguggcuggauau

SEQ ID NO: 1398 - RNA, 22 nt, Artificial Sequence
  SAMD9 targeting guide sequence portion
uuucuccaaguuuuggccucuu

SEQ ID NO: 1399 - RNA, 20 nt, Artificial Sequence
  SAMD9 targeting guide sequence portion
aaaaaugaagaggccaaaac

SEQ ID NO: 1400 - RNA, 20 nt, Artificial Sequence
  SAMD9 targeting guide sequence portion
aaaacccaggaacaauauua

SEQ ID NO: 1401 - RNA, 20 nt, Artificial Sequence
  SAMD9 targeting guide sequence portion
aaacccaggaacaauauuaa

SEQ ID NO: 1402 - RNA, 20 nt, Artificial Sequence
  SAMD9 targeting guide sequence portion
aacccaggaacaauauuaag

SEQ ID NO: 1403 - RNA, 20 nt, Artificial Sequence
  SAMD9 targeting guide sequence portion
aagaaaaaugaagaggccaa

SEQ ID NO: 1404 - RNA, 20 nt, Artificial Sequence
  SAMD9 targeting guide sequence portion
acccaggaacaauauuaaga

SEQ ID NO: 1405 - RNA, 20 nt, Artificial Sequence
  SAMD9 targeting guide sequence portion
agaaaaaugaagaggccaaa

SEQ ID NO: 1406 - RNA, 20 nt, Artificial Sequence
  SAMD9 targeting guide sequence portion
aggaacaauauuaagaaaaa

SEQ ID NO: 1407 - RNA, 20 nt, Artificial Sequence
  SAMD9 targeting guide sequence portion
aguuuuggccucuucauuuu

SEQ ID NO: 1408 - RNA, 20 nt, Artificial Sequence
  SAMD9 targeting guide sequence portion
auauuaagaaaaaugaagag

SEQ ID NO: 1409 - RNA, 20 nt, Artificial Sequence
  SAMD9 targeting guide sequence portion
auuaagaaaaaugaagaggc

SEQ ID NO: 1410 - RNA, 20 nt, Artificial Sequence
  SAMD9 targeting guide sequence portion
auuuuucuuaauauuguucc

SEQ ID NO: 1411 - RNA, 20 nt, Artificial Sequence
  SAMD9 targeting guide sequence portion
caauauuaagaaaaaugaag

SEQ ID NO: 1412 - RNA, 20 nt, Artificial Sequence
  SAMD9 targeting guide sequence portion
caggaacaauauuaagaaaa

SEQ ID NO: 1413 - RNA, 20 nt, Artificial Sequence
  SAMD9 targeting guide sequence portion
cauuuuucuuaauauuguuc

SEQ ID NO: 1414 - RNA, 20 nt, Artificial Sequence
  SAMD9 targeting guide sequence portion
ccaggaacaauauuaagaaa

SEQ ID NO: 1415 - RNA, 20 nt, Artificial Sequence
  SAMD9 targeting guide sequence portion
cccaggaacaauauuaagaa

SEQ ID NO: 1416 - RNA, 20 nt, Artificial Sequence
  SAMD9 targeting guide sequence portion
ccgaguuuuggccucuucau

SEQ ID NO: 1417 - RNA, 20 nt, Artificial Sequence
  SAMD9 targeting guide sequence portion
ccucuucauuuuucuuaaua

SEQ ID NO: 1418 - RNA, 20 nt, Artificial Sequence
  SAMD9 targeting guide sequence portion
cgaguuuuggccucuucauu

SEQ ID NO: 1419 - RNA, 20 nt, Artificial Sequence
  SAMD9 targeting guide sequence portion
cuaaaacccaggaacaauau

SEQ ID NO: 1420 - RNA, 20 nt, Artificial Sequence
  SAMD9 targeting guide sequence portion
cuccgaguuuuggccucuuc

SEQ ID NO: 1421 - RNA, 20 nt, Artificial Sequence
  SAMD9 targeting guide sequence portion
cucuucauuuuucuuaauau

SEQ ID NO: 1422 - RNA, 20 nt, Artificial Sequence
  SAMD9 targeting guide sequence portion
cuucauuuuucuuaauauug

SEQ ID NO: 1423 - RNA, 20 nt, Artificial Sequence
  SAMD9 targeting guide sequence portion
gaaaaaugaagaggccaaaa

SEQ ID NO: 1424 - RNA, 20 nt, Artificial Sequence
  SAMD9 targeting guide sequence portion
gaacaauauuaagaaaaaug

SEQ ID NO: 1425 - RNA, 20 nt, Artificial Sequence
  SAMD9 targeting guide sequence portion
gaguuuuggccucuucauuu

SEQ ID NO: 1426 - RNA, 20 nt, Artificial Sequence
  SAMD9 targeting guide sequence portion
gccucuucauuuuucuuaau

SEQ ID NO: 1427 - RNA, 20 nt, Artificial Sequence
  SAMD9 targeting guide sequence portion
gcuaaaacccaggaacaaua

SEQ ID NO: 1428 - RNA, 20 nt, Artificial Sequence
  SAMD9 targeting guide sequence portion
ggaacaauauuaagaaaaau

SEQ ID NO: 1429 - RNA, 20 nt, Artificial Sequence
  SAMD9 targeting guide sequence portion
ggccucuucauuuuucuuaa

SEQ ID NO: 1430 - RNA, 20 nt, Artificial Sequence
  SAMD9 targeting guide sequence portion
guuuuggccucuucauuuuu

SEQ ID NO: 1431 - RNA, 20 nt, Artificial Sequence
  SAMD9 targeting guide sequence portion
uaaaacccaggaacaauauu

SEQ ID NO: 1432 - RNA, 20 nt, Artificial Sequence
  SAMD9 targeting guide sequence portion
uaagaaaaaugaagaggcca

SEQ ID NO: 1433 - RNA, 20 nt, Artificial Sequence
  SAMD9 targeting guide sequence portion
uauuaagaaaaaugaagagg

SEQ ID NO: 1434 - RNA, 20 nt, Artificial Sequence
  SAMD9 targeting guide sequence portion
uccgaguuuuggccucuuca

SEQ ID NO: 1435 - RNA, 20 nt, Artificial Sequence
  SAMD9 targeting guide sequence portion
ucuuaauauuguuccugggu

SEQ ID NO: 1436 - RNA, 20 nt, Artificial Sequence
  SAMD9 targeting guide sequence portion
uggccucuucauuuuucuua

SEQ ID NO: 1437 - RNA, 20 nt, Artificial Sequence
  SAMD9 targeting guide sequence portion
uuaagaaaaaugaagaggcc

SEQ ID NO: 1438 - RNA, 20 nt, Artificial Sequence
  SAMD9 targeting guide sequence portion
uucuuaauauuguuccuggg

SEQ ID NO: 1439 - RNA, 20 nt, Artificial Sequence
  SAMD9 targeting guide sequence portion
uuggccucuucauuuuucuu

SEQ ID NO: 1440 - RNA, 20 nt, Artificial Sequence
  SAMD9 targeting guide sequence portion
uuucuuaauauuguuccugg

SEQ ID NO: 1441 - RNA, 20 nt, Artificial Sequence
  SAMD9 targeting guide sequence portion
uuuggccucuucauuuuucu

SEQ ID NO: 1442 - RNA, 20 nt, Artificial Sequence
  SAMD9 targeting guide sequence portion
uuuucuuaauauuguuccug

SEQ ID NO: 1443 - RNA, 20 nt, Artificial Sequence
  SAMD9 targeting guide sequence portion
uuuuggccucuucauuuuuc

SEQ ID NO: 1444 - RNA, 20 nt, Artificial Sequence
  SAMD9 targeting guide sequence portion
uuuuucuuaauauuguuccu

SEQ ID NO: 1445 - RNA, 21 nt, Artificial Sequence
  SAMD9 targeting guide sequence portion
aaaaaugaagaggccaaaacu

SEQ ID NO: 1446 - RNA, 21 nt, Artificial Sequence
  SAMD9 targeting guide sequence portion
aaaacccaggaacaauauuaa

SEQ ID NO: 1447 - RNA, 21 nt, Artificial Sequence
  SAMD9 targeting guide sequence portion
aaacccaggaacaauauuaag

SEQ ID NO: 1448 - RNA, 21 nt, Artificial Sequence
  SAMD9 targeting guide sequence portion
aacccaggaacaauauuaaga

SEQ ID NO: 1449 - RNA, 21 nt, Artificial Sequence
  SAMD9 targeting guide sequence portion
aagaaaaaugaagaggccaaa

SEQ ID NO: 1450 - RNA, 21 nt, Artificial Sequence
  SAMD9 targeting guide sequence portion
acccaggaacaauauuaagaa

SEQ ID NO: 1451 - RNA, 21 nt, Artificial Sequence
  SAMD9 targeting guide sequence portion
agaaaaaugaagaggccaaaa

SEQ ID NO: 1452 - RNA, 21 nt, Artificial Sequence
  SAMD9 targeting guide sequence portion
aguuuuggccucuucauuuuu

SEQ ID NO: 1453 - RNA, 21 nt, Artificial Sequence
  SAMD9 targeting guide sequence portion
auauuaagaaaaaugaagagg

SEQ ID NO: 1454 - RNA, 21 nt, Artificial Sequence
  SAMD9 targeting guide sequence portion
auuaagaaaaaugaagaggcc

SEQ ID NO: 1455 - RNA, 21 nt, Artificial Sequence
  SAMD9 targeting guide sequence portion
caggaacaauauuaagaaaaa

SEQ ID NO: 1456 - RNA, 21 nt, Artificial Sequence
  SAMD9 targeting guide sequence portion
cauuuuucuuaauauuguucc

SEQ ID NO: 1457 - RNA, 21 nt, Artificial Sequence
  SAMD9 targeting guide sequence portion
ccaggaacaauauuaagaaaa

SEQ ID NO: 1458 - RNA, 21 nt, Artificial Sequence
  SAMD9 targeting guide sequence portion
cccaggaacaauauuaagaaa

SEQ ID NO: 1459 - RNA, 21 nt, Artificial Sequence
  SAMD9 targeting guide sequence portion
ccgaguuuuggccucuucauu

SEQ ID NO: 1460 - RNA, 21 nt, Artificial Sequence
  SAMD9 targeting guide sequence portion
ccucuucauuuuucuuaauau

SEQ ID NO: 1461 - RNA, 21 nt, Artificial Sequence
  SAMD9 targeting guide sequence portion
cgaguuuuggccucuucauuu

SEQ ID NO: 1462 - RNA, 21 nt, Artificial Sequence
  SAMD9 targeting guide sequence portion
cuaaaacccaggaacaauauu

SEQ ID NO: 1463 - RNA, 21 nt, Artificial Sequence
  SAMD9 targeting guide sequence portion
cuccgaguuuuggccucuuca

SEQ ID NO: 1464 - RNA, 21 nt, Artificial Sequence
  SAMD9 targeting guide sequence portion
gaaaaaugaagaggccaaaac

SEQ ID NO: 1465 - RNA, 21 nt, Artificial Sequence
  SAMD9 targeting guide sequence portion
gaguuuuggccucuucauuuu

SEQ ID NO: 1466 - RNA, 21 nt, Artificial Sequence
  SAMD9 targeting guide sequence portion
gccucuucauuuuucuuaaua

SEQ ID NO: 1467 - RNA, 21 nt, Artificial Sequence
  SAMD9 targeting guide sequence portion
gcuaaaacccaggaacaauau

SEQ ID NO: 1468 - RNA, 21 nt, Artificial Sequence
  SAMD9 targeting guide sequence portion
ggaacaauauuaagaaaaaug

SEQ ID NO: 1469 - RNA, 21 nt, Artificial Sequence
  SAMD9 targeting guide sequence portion
ggccucuucauuuuucuuaau

SEQ ID NO: 1470 - RNA, 21 nt, Artificial Sequence
  SAMD9 targeting guide sequence portion
guuuuggccucuucauuuuuc

SEQ ID NO: 1471 - RNA, 21 nt, Artificial Sequence
  SAMD9 targeting guide sequence portion
uaaaacccaggaacaauauua

SEQ ID NO: 1472 - RNA, 21 nt, Artificial Sequence
  SAMD9 targeting guide sequence portion
uaagaaaaaugaagaggccaa

SEQ ID NO: 1473 - RNA, 21 nt, Artificial Sequence
  SAMD9 targeting guide sequence portion
uauuaagaaaaaugaagaggc

SEQ ID NO: 1474 - RNA, 21 nt, Artificial Sequence
  SAMD9 targeting guide sequence portion
uccgaguuuuggccucuucau

SEQ ID NO: 1475 - RNA, 21 nt, Artificial Sequence
  SAMD9 targeting guide sequence portion
ucuccgaguuuuggccucuuc

SEQ ID NO: 1476 - RNA, 21 nt, Artificial Sequence
  SAMD9 targeting guide sequence portion
ucuuaauauuguuccuggguu

SEQ ID NO: 1477 - RNA, 21 nt, Artificial Sequence
  SAMD9 targeting guide sequence portion
ugcuaaaacccaggaacaaua

SEQ ID NO: 1478 - RNA, 21 nt, Artificial Sequence
  SAMD9 targeting guide sequence portion
uggccucuucauuuuucuuaa

SEQ ID NO: 1479 - RNA, 21 nt, Artificial Sequence
  SAMD9 targeting guide sequence portion
uuaagaaaaaugaagaggcca

SEQ ID NO: 1480 - RNA, 21 nt, Artificial Sequence
  SAMD9 targeting guide sequence portion
uucuuaauauuguuccugggu

SEQ ID NO: 1481 - RNA, 21 nt, Artificial Sequence
  SAMD9 targeting guide sequence portion
uuggccucuucauuuuucuua

SEQ ID NO: 1482 - RNA, 21 nt, Artificial Sequence
  SAMD9 targeting guide sequence portion
uuucuuaauauuguuccuggg

SEQ ID NO: 1483 - RNA, 21 nt, Artificial Sequence
  SAMD9 targeting guide sequence portion
uuuggccucuucauuuuucuu

SEQ ID NO: 1484 - RNA, 21 nt, Artificial Sequence
  SAMD9 targeting guide sequence portion
uuuucuuaauauuguuccugg

SEQ ID NO: 1485 - RNA, 21 nt, Artificial Sequence
  SAMD9 targeting guide sequence portion
uuuuggccucuucauuuuucu

SEQ ID NO: 1486 - RNA, 21 nt, Artificial Sequence
  SAMD9 targeting guide sequence portion
uuuuucuuaauauuguuccug

SEQ ID NO: 1487 - RNA, 22 nt, Artificial Sequence
  SAMD9 targeting guide sequence portion
aaaaaugaagaggccaaaacuc

SEQ ID NO: 1488 - RNA, 22 nt, Artificial Sequence
  SAMD9 targeting guide sequence portion
aaaacccaggaacaauauuaag

SEQ ID NO: 1489 - RNA, 22 nt, Artificial Sequence
  SAMD9 targeting guide sequence portion
aaacccaggaacaauauuaaga

SEQ ID NO: 1490 - RNA, 22 nt, Artificial Sequence
  SAMD9 targeting guide sequence portion
aacccaggaacaauauuaagaa

SEQ ID NO: 1491 - RNA, 22 nt, Artificial Sequence
  SAMD9 targeting guide sequence portion
aagaaaaaugaagaggccaaaa

SEQ ID NO: 1492 - RNA, 22 nt, Artificial Sequence
  SAMD9 targeting guide sequence portion
aauauuaagaaaaaugaagagg

SEQ ID NO: 1493 - RNA, 22 nt, Artificial Sequence
  SAMD9 targeting guide sequence portion
acccaggaacaauauuaagaaa

SEQ ID NO: 1494 - RNA, 22 nt, Artificial Sequence
  SAMD9 targeting guide sequence portion
agaaaaaugaagaggccaaaac

SEQ ID NO: 1495 - RNA, 22 nt, Artificial Sequence
  SAMD9 targeting guide sequence portion
aggaacaauauuaagaaaaaug

SEQ ID NO: 1496 - RNA, 22 nt, Artificial Sequence
  SAMD9 targeting guide sequence portion
aguuuuggccucuucauuuuuc

SEQ ID NO: 1497 - RNA, 22 nt, Artificial Sequence
  SAMD9 targeting guide sequence portion
auauuaagaaaaaugaagaggc

SEQ ID NO: 1498 - RNA, 22 nt, Artificial Sequence
  SAMD9 targeting guide sequence portion
auuaagaaaaaugaagaggcca

SEQ ID NO: 1499 - RNA, 22 nt, Artificial Sequence
  SAMD9 targeting guide sequence portion
auuuuucuuaauauuguuccug

SEQ ID NO: 1500 - RNA, 22 nt, Artificial Sequence
  SAMD9 targeting guide sequence portion
caauauuaagaaaaaugaagag

SEQ ID NO: 1501 - RNA, 22 nt, Artificial Sequence
  SAMD9 targeting guide sequence portion
caggaacaauauuaagaaaaau

SEQ ID NO: 1502 - RNA, 22 nt, Artificial Sequence
  SAMD9 targeting guide sequence portion
cauuuuucuuaauauuguuccu

SEQ ID NO: 1503 - RNA, 22 nt, Artificial Sequence
  SAMD9 targeting guide sequence portion
ccaggaacaauauuaagaaaaa

SEQ ID NO: 1504 - RNA, 22 nt, Artificial Sequence
  SAMD9 targeting guide sequence portion
cccaggaacaauauuaagaaaa

SEQ ID NO: 1505 - RNA, 22 nt, Artificial Sequence
  SAMD9 targeting guide sequence portion
ccgaguuuuggccucuucauuu

SEQ ID NO: 1506 - RNA, 22 nt, Artificial Sequence
  SAMD9 targeting guide sequence portion
ccucuucauuuuucuuaauauu

SEQ ID NO: 1507 - RNA, 22 nt, Artificial Sequence
  SAMD9 targeting guide sequence portion
cgaguuuuggccucuucauuuu

SEQ ID NO: 1508 - RNA, 22 nt, Artificial Sequence
  SAMD9 targeting guide sequence portion
cuaaaacccaggaacaauauua

SEQ ID NO: 1509 - RNA, 22 nt, Artificial Sequence
  SAMD9 targeting guide sequence portion
cuccgaguuuuggccucuucau

SEQ ID NO: 1510 - RNA, 22 nt, Artificial Sequence
  SAMD9 targeting guide sequence portion
cucuucauuuuucuuaauauug

SEQ ID NO: 1511 - RNA, 22 nt, Artificial Sequence
  SAMD9 targeting guide sequence portion
cugcuaaaacccaggaacaaua

SEQ ID NO: 1512 - RNA, 22 nt, Artificial Sequence
  SAMD9 targeting guide sequence portion
gaaaaaugaagaggccaaaacu

SEQ ID NO: 1513 - RNA, 22 nt, Artificial Sequence
  SAMD9 targeting guide sequence portion
gaguuuuggccucuucauuuuu

SEQ ID NO: 1514 - RNA, 22 nt, Artificial Sequence
  SAMD9 targeting guide sequence portion
gccucuucauuuuucuuaauau

SEQ ID NO: 1515 - RNA, 22 nt, Artificial Sequence
  SAMD9 targeting guide sequence portion
gcuaaaacccaggaacaauauu

SEQ ID NO: 1516 - RNA, 22 nt, Artificial Sequence
  SAMD9 targeting guide sequence portion
ggaacaauauuaagaaaaauga

SEQ ID NO: 1517 - RNA, 22 nt, Artificial Sequence
  SAMD9 targeting guide sequence portion
ggccucuucauuuuucuuaaua

SEQ ID NO: 1518 - RNA, 22 nt, Artificial Sequence
  SAMD9 targeting guide sequence portion
guuuuggccucuucauuuuucu

SEQ ID NO: 1519 - RNA, 22 nt, Artificial Sequence
  SAMD9 targeting guide sequence portion
uaaaacccaggaacaauauuaa

SEQ ID NO: 1520 - RNA, 22 nt, Artificial Sequence
  SAMD9 targeting guide sequence portion
uaagaaaaaugaagaggccaaa

SEQ ID NO: 1521 - RNA, 22 nt, Artificial Sequence
  SAMD9 targeting guide sequence portion
uauuaagaaaaaugaagaggcc

SEQ ID NO: 1522 - RNA, 22 nt, Artificial Sequence
  SAMD9 targeting guide sequence portion
ucauuuuucuuaauauuguucc

SEQ ID NO: 1523 - RNA, 22 nt, Artificial Sequence
  SAMD9 targeting guide sequence portion
uccgaguuuuggccucuucauu

SEQ ID NO: 1524 - RNA, 22 nt, Artificial Sequence
  SAMD9 targeting guide sequence portion
ucuccgaguuuuggccucuuca

SEQ ID NO: 1525 - RNA, 22 nt, Artificial Sequence
  SAMD9 targeting guide sequence portion
ucuuaauauuguuccuggguuu

SEQ ID NO: 1526 - RNA, 22 nt, Artificial Sequence
  SAMD9 targeting guide sequence portion
ugcuaaaacccaggaacaauau

SEQ ID NO: 1527 - RNA, 22 nt, Artificial Sequence
  SAMD9 targeting guide sequence portion
uggccucuucauuuuucuuaau

SEQ ID NO: 1528 - RNA, 22 nt, Artificial Sequence
  SAMD9 targeting guide sequence portion
uuaagaaaaaugaagaggccaa

SEQ ID NO: 1529 - RNA, 22 nt, Artificial Sequence
  SAMD9 targeting guide sequence portion
uucuccgaguuuuggccucuuc

SEQ ID NO: 1530 - RNA, 22 nt, Artificial Sequence
  SAMD9 targeting guide sequence portion
uucuuaauauuguuccuggguu

SEQ ID NO: 1531 - RNA, 22 nt, Artificial Sequence
  SAMD9 targeting guide sequence portion
uuggccucuucauuuuucuuaa

SEQ ID NO: 1532 - RNA, 22 nt, Artificial Sequence
  SAMD9 targeting guide sequence portion
uuucuuaauauuguuccugggu

SEQ ID NO: 1533 - RNA, 22 nt, Artificial Sequence
  SAMD9 targeting guide sequence portion
uuuggccucuucauuuuucuua

SEQ ID NO: 1534 - RNA, 22 nt, Artificial Sequence
  SAMD9 targeting guide sequence portion
uuuucuuaauauuguuccuggg

SEQ ID NO: 1535 - RNA, 22 nt, Artificial Sequence
  SAMD9 targeting guide sequence portion
uuuuggccucuucauuuuucuu

SEQ ID NO: 1536 - RNA, 22 nt, Artificial Sequence
  SAMD9 targeting guide sequence portion
uuuuucuuaauauuguuccugg

SEQ ID NO: 1537 - RNA, 20 nt, Artificial Sequence
  SAMD9 targeting guide sequence portion
aaaacucaggaacaauauua

SEQ ID NO: 1538 - RNA, 20 nt, Artificial Sequence
  SAMD9 targeting guide sequence portion
aaacucaggaacaauauuaa

SEQ ID NO: 1539 - RNA, 20 nt, Artificial Sequence
  SAMD9 targeting guide sequence portion
aacucaggaacaauauuaag

SEQ ID NO: 1540 - RNA, 20 nt, Artificial Sequence
  SAMD9 targeting guide sequence portion
aauacuuuguccugcuaaaa

SEQ ID NO: 1541 - RNA, 20 nt, Artificial Sequence
  SAMD9 targeting guide sequence portion
aauauuguuccugaguuuua

SEQ ID NO: 1542 - RNA, 20 nt, Artificial Sequence
  SAMD9 targeting guide sequence portion
acucaggaacaauauuaagc

SEQ ID NO: 1543 - RNA, 20 nt, Artificial Sequence
  SAMD9 targeting guide sequence portion
acuuuguccugcuaaaacuc

SEQ ID NO: 1544 - RNA, 20 nt, Artificial Sequence
  SAMD9 targeting guide sequence portion
aguuuuagcaggacaaagua

SEQ ID NO: 1545 - RNA, 20 nt, Artificial Sequence
  SAMD9 targeting guide sequence portion
auacuuuguccugcuaaaac

SEQ ID NO: 1546 - RNA, 20 nt, Artificial Sequence
  SAMD9 targeting guide sequence portion
auauuguuccugaguuuuag

SEQ ID NO: 1547 - RNA, 20 nt, Artificial Sequence
  SAMD9 targeting guide sequence portion
augaauacuuuguccugcua

SEQ ID NO: 1548 - RNA, 20 nt, Artificial Sequence
  SAMD9 targeting guide sequence portion
auuguuccugaguuuuagca

SEQ ID NO: 1549 - RNA, 20 nt, Artificial Sequence
  SAMD9 targeting guide sequence portion
auuuugcuuaauauuguucc

SEQ ID NO: 1550 - RNA, 20 nt, Artificial Sequence
  SAMD9 targeting guide sequence portion
cauuuugcuuaauauuguuc

SEQ ID NO: 1551 - RNA, 20 nt, Artificial Sequence
  SAMD9 targeting guide sequence portion
ccugaguuuuagcaggacaa

SEQ ID NO: 1552 - RNA, 20 nt, Artificial Sequence
  SAMD9 targeting guide sequence portion
ccugcuaaaacucaggaaca

SEQ ID NO: 1553 - RNA, 20 nt, Artificial Sequence
  SAMD9 targeting guide sequence portion
cuaaaacucaggaacaauau

SEQ ID NO: 1554 - RNA, 20 nt, Artificial Sequence
  SAMD9 targeting guide sequence portion
cucaggaacaauauuaagca

SEQ ID NO: 1555 - RNA, 20 nt, Artificial Sequence
  SAMD9 targeting guide sequence portion
cugaguuuuagcaggacaaa

SEQ ID NO: 1556 - RNA, 20 nt, Artificial Sequence
  SAMD9 targeting guide sequence portion
cugcuaaaacucaggaacaa

SEQ ID NO: 1557 - RNA, 20 nt, Artificial Sequence
  SAMD9 targeting guide sequence portion
cuuaauauuguuccugaguu

SEQ ID NO: 1558 - RNA, 20 nt, Artificial Sequence
  SAMD9 targeting guide sequence portion
cuuuguccugcuaaaacuca

SEQ ID NO: 1559 - RNA, 20 nt, Artificial Sequence
  SAMD9 targeting guide sequence portion
gaauacuuuguccugcuaaa

SEQ ID NO: 1560 - RNA, 20 nt, Artificial Sequence
  SAMD9 targeting guide sequence portion
gaguuuuagcaggacaaagu

SEQ ID NO: 1561 - RNA, 20 nt, Artificial Sequence
  SAMD9 targeting guide sequence portion
gaugaauacuuuguccugcu

SEQ ID NO: 1562 - RNA, 20 nt, Artificial Sequence
  SAMD9 targeting guide sequence portion
gcuaaaacucaggaacaaua

SEQ ID NO: 1563 - RNA, 20 nt, Artificial Sequence
  SAMD9 targeting guide sequence portion
gcuuaauauuguuccugagu

SEQ ID NO: 1564 - RNA, 20 nt, Artificial Sequence
  SAMD9 targeting guide sequence portion
guccugcuaaaacucaggaa

SEQ ID NO: 1565 - RNA, 20 nt, Artificial Sequence
  SAMD9 targeting guide sequence portion
guuccugaguuuuagcagga

SEQ ID NO: 1566 - RNA, 20 nt, Artificial Sequence
  SAMD9 targeting guide sequence portion
uaaaacucaggaacaauauu

SEQ ID NO: 1567 - RNA, 20 nt, Artificial Sequence
  SAMD9 targeting guide sequence portion
uaauauuguuccugaguuuu

SEQ ID NO: 1568 - RNA, 20 nt, Artificial Sequence
  SAMD9 targeting guide sequence portion
uacuuuguccugcuaaaacu

SEQ ID NO: 1569 - RNA, 20 nt, Artificial Sequence
  SAMD9 targeting guide sequence portion
uauuguuccugaguuuuagc

SEQ ID NO: 1570 - RNA, 20 nt, Artificial Sequence
  SAMD9 targeting guide sequence portion
ucaggaacaauauuaagcaa

SEQ ID NO: 1571 - RNA, 20 nt, Artificial Sequence
  SAMD9 targeting guide sequence portion
ucauuuugcuuaauauuguu

SEQ ID NO: 1572 - RNA, 20 nt, Artificial Sequence
  SAMD9 targeting guide sequence portion
uccugaguuuuagcaggaca

SEQ ID NO: 1573 - RNA, 20 nt, Artificial Sequence
  SAMD9 targeting guide sequence portion
uccugcuaaaacucaggaac

SEQ ID NO: 1574 - RNA, 20 nt, Artificial Sequence
  SAMD9 targeting guide sequence portion
ugaauacuuuguccugcuaa

SEQ ID NO: 1575 - RNA, 20 nt, Artificial Sequence
  SAMD9 targeting guide sequence portion
ugaguuuuagcaggacaaag

SEQ ID NO: 1576 - RNA, 20 nt, Artificial Sequence
  SAMD9 targeting guide sequence portion
ugcuaaaacucaggaacaau

SEQ ID NO: 1577 - RNA, 20 nt, Artificial Sequence
  SAMD9 targeting guide sequence portion
ugcuuaauauuguuccugag

SEQ ID NO: 1578 - RNA, 20 nt, Artificial Sequence
  SAMD9 targeting guide sequence portion
uguccugcuaaaacucagga

SEQ ID NO: 1579 - RNA, 20 nt, Artificial Sequence
  SAMD9 targeting guide sequence portion
uguuccugaguuuuagcagg

SEQ ID NO: 1580 - RNA, 20 nt, Artificial Sequence
  SAMD9 targeting guide sequence portion
uuaauauuguuccugaguuu

SEQ ID NO: 1581 - RNA, 20 nt, Artificial Sequence
  SAMD9 targeting guide sequence portion
uucauuuugcuuaauauugu

SEQ ID NO: 1582 - RNA, 20 nt, Artificial Sequence
  SAMD9 targeting guide sequence portion
uuccugaguuuuagcaggac

SEQ ID NO: 1583 - RNA, 20 nt, Artificial Sequence
  SAMD9 targeting guide sequence portion
uugcuuaauauuguuccuga

SEQ ID NO: 1584 - RNA, 20 nt, Artificial Sequence
  SAMD9 targeting guide sequence portion
uuguccugcuaaaacucagg

SEQ ID NO: 1585 - RNA, 20 nt, Artificial Sequence
  SAMD9 targeting guide sequence portion
uuguuccugaguuuuagcag

SEQ ID NO: 1586 - RNA, 20 nt, Artificial Sequence
  SAMD9 targeting guide sequence portion
uuugcuuaauauuguuccug

SEQ ID NO: 1587 - RNA, 20 nt, Artificial Sequence
  SAMD9 targeting guide sequence portion
uuuguccugcuaaaacucag

SEQ ID NO: 1588 - RNA, 20 nt, Artificial Sequence
  SAMD9 targeting guide sequence portion
uuuugcuuaauauuguuccu

SEQ ID NO: 1589 - RNA, 21 nt, Artificial Sequence
  SAMD9 targeting guide sequence portion
aaaacucaggaacaauauuaa

SEQ ID NO: 1590 - RNA, 21 nt, Artificial Sequence
  SAMD9 targeting guide sequence portion
aaacucaggaacaauauuaag

SEQ ID NO: 1591 - RNA, 21 nt, Artificial Sequence
  SAMD9 targeting guide sequence portion
aacucaggaacaauauuaagc

SEQ ID NO: 1592 - RNA, 21 nt, Artificial Sequence
  SAMD9 targeting guide sequence portion
aauacuuuguccugcuaaaac

SEQ ID NO: 1593 - RNA, 21 nt, Artificial Sequence
  SAMD9 targeting guide sequence portion
aauauuguuccugaguuuuag

SEQ ID NO: 1594 - RNA, 21 nt, Artificial Sequence
  SAMD9 targeting guide sequence portion
acucaggaacaauauuaagca

SEQ ID NO: 1595 - RNA, 21 nt, Artificial Sequence
  SAMD9 targeting guide sequence portion
acuuuguccugcuaaaacuca

SEQ ID NO: 1596 - RNA, 21 nt, Artificial Sequence
  SAMD9 targeting guide sequence portion
aguuuuagcaggacaaaguau

SEQ ID NO: 1597 - RNA, 21 nt, Artificial Sequence
  SAMD9 targeting guide sequence portion
auacuuuguccugcuaaaacu

SEQ ID NO: 1598 - RNA, 21 nt, Artificial Sequence
  SAMD9 targeting guide sequence portion
auauuguuccugaguuuuagc

SEQ ID NO: 1599 - RNA, 21 nt, Artificial Sequence
  SAMD9 targeting guide sequence portion
augaauacuuuguccugcuaa

SEQ ID NO: 1600 - RNA, 21 nt, Artificial Sequence
  SAMD9 targeting guide sequence portion
auuguuccugaguuuuagcag

SEQ ID NO: 1601 - RNA, 21 nt, Artificial Sequence
  SAMD9 targeting guide sequence portion
auuuugcuuaauauuguuccu

SEQ ID NO: 1602 - RNA, 21 nt, Artificial Sequence
  SAMD9 targeting guide sequence portion
cauuuugcuuaauauuguucc

SEQ ID NO: 1603 - RNA, 21 nt, Artificial Sequence
  SAMD9 targeting guide sequence portion
ccugaguuuuagcaggacaaa

SEQ ID NO: 1604 - RNA, 21 nt, Artificial Sequence
  SAMD9 targeting guide sequence portion
ccugcuaaaacucaggaacaa

SEQ ID NO: 1605 - RNA, 21 nt, Artificial Sequence
  SAMD9 targeting guide sequence portion
cuaaaacucaggaacaauauu

SEQ ID NO: 1606 - RNA, 21 nt, Artificial Sequence
  SAMD9 targeting guide sequence portion
cucaggaacaauauuaagcaa

SEQ ID NO: 1607 - RNA, 21 nt, Artificial Sequence
  SAMD9 targeting guide sequence portion
cugaguuuuagcaggacaaag

SEQ ID NO: 1608 - RNA, 21 nt, Artificial Sequence
  SAMD9 targeting guide sequence portion
cugcuaaaacucaggaacaau

SEQ ID NO: 1609 - RNA, 21 nt, Artificial Sequence
  SAMD9 targeting guide sequence portion
cuuaauauuguuccugaguuu

SEQ ID NO: 1610 - RNA, 21 nt, Artificial Sequence
  SAMD9 targeting guide sequence portion
cuucauuuugcuuaauauugu

SEQ ID NO: 1611 - RNA, 21 nt, Artificial Sequence
  SAMD9 targeting guide sequence portion
cuuuguccugcuaaaacucag

SEQ ID NO: 1612 - RNA, 21 nt, Artificial Sequence
  SAMD9 targeting guide sequence portion
gaauacuuuguccugcuaaaa

SEQ ID NO: 1613 - RNA, 21 nt, Artificial Sequence
  SAMD9 targeting guide sequence portion
gaguuuuagcaggacaaagua

SEQ ID NO: 1614 - RNA, 21 nt, Artificial Sequence
  SAMD9 targeting guide sequence portion
gaugaauacuuuguccugcua

SEQ ID NO: 1615 - RNA, 21 nt, Artificial Sequence
  SAMD9 targeting guide sequence portion
gcuaaaacucaggaacaauau

SEQ ID NO: 1616 - RNA, 21 nt, Artificial Sequence
  SAMD9 targeting guide sequence portion
gcuuaauauuguuccugaguu

SEQ ID NO: 1617 - RNA, 21 nt, Artificial Sequence
  SAMD9 targeting guide sequence portion
guccugcuaaaacucaggaac

SEQ ID NO: 1618 - RNA, 21 nt, Artificial Sequence
  SAMD9 targeting guide sequence portion
guuccugaguuuuagcaggac

SEQ ID NO: 1619 - RNA, 21 nt, Artificial Sequence
  SAMD9 targeting guide sequence portion
uaaaacucaggaacaauauua

SEQ ID NO: 1620 - RNA, 21 nt, Artificial Sequence
  SAMD9 targeting guide sequence portion
uaauauuguuccugaguuuua

SEQ ID NO: 1621 - RNA, 21 nt, Artificial Sequence
  SAMD9 targeting guide sequence portion
uacuuuguccugcuaaaacuc

SEQ ID NO: 1622 - RNA, 21 nt, Artificial Sequence
  SAMD9 targeting guide sequence portion
uauuguuccugaguuuuagca

SEQ ID NO: 1623 - RNA, 21 nt, Artificial Sequence
  SAMD9 targeting guide sequence portion
ucaggaacaauauuaagcaaa

SEQ ID NO: 1624 - RNA, 21 nt, Artificial Sequence
  SAMD9 targeting guide sequence portion
ucauuuugcuuaauauuguuc

SEQ ID NO: 1625 - RNA, 21 nt, Artificial Sequence
  SAMD9 targeting guide sequence portion
uccugaguuuuagcaggacaa

SEQ ID NO: 1626 - RNA, 21 nt, Artificial Sequence
  SAMD9 targeting guide sequence portion
uccugcuaaaacucaggaaca

SEQ ID NO: 1627 - RNA, 21 nt, Artificial Sequence
  SAMD9 targeting guide sequence portion
ugaauacuuuguccugcuaaa

SEQ ID NO: 1628 - RNA, 21 nt, Artificial Sequence
  SAMD9 targeting guide sequence portion
ugaguuuuagcaggacaaagu

SEQ ID NO: 1629 - RNA, 21 nt, Artificial Sequence
  SAMD9 targeting guide sequence portion
ugaugaauacuuuguccugcu

SEQ ID NO: 1630 - RNA, 21 nt, Artificial Sequence
  SAMD9 targeting guide sequence portion
ugcuaaaacucaggaacaaua

SEQ ID NO: 1631 - RNA, 21 nt, Artificial Sequence
  SAMD9 targeting guide sequence portion
ugcuuaauauuguuccugagu

SEQ ID NO: 1632 - RNA, 21 nt, Artificial Sequence
  SAMD9 targeting guide sequence portion
uguccugcuaaaacucaggaa

SEQ ID NO: 1633 - RNA, 21 nt, Artificial Sequence
  SAMD9 targeting guide sequence portion
uguuccugaguuuuagcagga

SEQ ID NO: 1634 - RNA, 21 nt, Artificial Sequence
  SAMD9 targeting guide sequence portion
uuaauauuguuccugaguuuu

SEQ ID NO: 1635 - RNA, 21 nt, Artificial Sequence
  SAMD9 targeting guide sequence portion
uuccugaguuuuagcaggaca

SEQ ID NO: 1636 - RNA, 21 nt, Artificial Sequence
  SAMD9 targeting guide sequence portion
uugcuuaauauuguuccugag

SEQ ID NO: 1637 - RNA, 21 nt, Artificial Sequence
  SAMD9 targeting guide sequence portion
uuguccugcuaaaacucagga

SEQ ID NO: 1638 - RNA, 21 nt, Artificial Sequence
  SAMD9 targeting guide sequence portion
uuguuccugaguuuuagcagg

SEQ ID NO: 1639 - RNA, 21 nt, Artificial Sequence
  SAMD9 targeting guide sequence portion
uuugcuuaauauuguuccuga

SEQ ID NO: 1640 - RNA, 21 nt, Artificial Sequence
  SAMD9 targeting guide sequence portion
uuuguccugcuaaaacucagg

SEQ ID NO: 1641 - RNA, 21 nt, Artificial Sequence
  SAMD9 targeting guide sequence portion
uuuugcuuaauauuguuccug

SEQ ID NO: 1642 - RNA, 22 nt, Artificial Sequence
  SAMD9 targeting guide sequence portion
aaaacucaggaacaauauuaag

SEQ ID NO: 1643 - RNA, 22 nt, Artificial Sequence
  SAMD9 targeting guide sequence portion
aaacucaggaacaauauuaagc

SEQ ID NO: 1644 - RNA, 22 nt, Artificial Sequence
  SAMD9 targeting guide sequence portion
aacucaggaacaauauuaagca

SEQ ID NO: 1645 - RNA, 22 nt, Artificial Sequence
  SAMD9 targeting guide sequence portion
aauacuuuguccugcuaaaacu

SEQ ID NO: 1646 - RNA, 22 nt, Artificial Sequence
  SAMD9 targeting guide sequence portion
aauauuguuccugaguuuuagc

SEQ ID NO: 1647 - RNA, 22 nt, Artificial Sequence
  SAMD9 targeting guide sequence portion
acucaggaacaauauuaagcaa

SEQ ID NO: 1648 - RNA, 22 nt, Artificial Sequence
  SAMD9 targeting guide sequence portion
acuuuguccugcuaaaacucag

SEQ ID NO: 1649 - RNA, 22 nt, Artificial Sequence
  SAMD9 targeting guide sequence portion
aguuuuagcaggacaaaguauu

SEQ ID NO: 1650 - RNA, 22 nt, Artificial Sequence
  SAMD9 targeting guide sequence portion
auacuuuguccugcuaaaacuc

SEQ ID NO: 1651 - RNA, 22 nt, Artificial Sequence
  SAMD9 targeting guide sequence portion
auauuguuccugaguuuuagca

SEQ ID NO: 1652 - RNA, 22 nt, Artificial Sequence
  SAMD9 targeting guide sequence portion
augaauacuuuguccugcuaaa

SEQ ID NO: 1653 - RNA, 22 nt, Artificial Sequence
  SAMD9 targeting guide sequence portion
auuguuccugaguuuuagcagg

SEQ ID NO: 1654 - RNA, 22 nt, Artificial Sequence
  SAMD9 targeting guide sequence portion
auuuugcuuaauauuguuccug

SEQ ID NO: 1655 - RNA, 22 nt, Artificial Sequence
  SAMD9 targeting guide sequence portion
cauuuugcuuaauauuguuccu

SEQ ID NO: 1656 - RNA, 22 nt, Artificial Sequence
  SAMD9 targeting guide sequence portion
ccugaguuuuagcaggacaaag

SEQ ID NO: 1657 - RNA, 22 nt, Artificial Sequence
  SAMD9 targeting guide sequence portion
ccugcuaaaacucaggaacaau

SEQ ID NO: 1658 - RNA, 22 nt, Artificial Sequence
  SAMD9 targeting guide sequence portion
cuaaaacucaggaacaauauua

SEQ ID NO: 1659 - RNA, 22 nt, Artificial Sequence
  SAMD9 targeting guide sequence portion
cucaggaacaauauuaagcaaa

SEQ ID NO: 1660 - RNA, 22 nt, Artificial Sequence
  SAMD9 targeting guide sequence portion
cugaguuuuagcaggacaaagu

SEQ ID NO: 1661 - RNA, 22 nt, Artificial Sequence
  SAMD9 targeting guide sequence portion
cugcuaaaacucaggaacaaua

SEQ ID NO: 1662 - RNA, 22 nt, Artificial Sequence
  SAMD9 targeting guide sequence portion
cuuaauauuguuccugaguuuu

SEQ ID NO: 1663 - RNA, 22 nt, Artificial Sequence
  SAMD9 targeting guide sequence portion
cuucauuuugcuuaauauuguu

SEQ ID NO: 1664 - RNA, 22 nt, Artificial Sequence
  SAMD9 targeting guide sequence portion
cuuuguccugcuaaaacucagg

SEQ ID NO: 1665 - RNA, 22 nt, Artificial Sequence
  SAMD9 targeting guide sequence portion
gaauacuuuguccugcuaaaac

SEQ ID NO: 1666 - RNA, 22 nt, Artificial Sequence
  SAMD9 targeting guide sequence portion
gaguuuuagcaggacaaaguau

SEQ ID NO: 1667 - RNA, 22 nt, Artificial Sequence
  SAMD9 targeting guide sequence portion
gaugaauacuuuguccugcuaa

SEQ ID NO: 1668 - RNA, 22 nt, Artificial Sequence
  SAMD9 targeting guide sequence portion
gcuaaaacucaggaacaauauu

SEQ ID NO: 1669 - RNA, 22 nt, Artificial Sequence
  SAMD9 targeting guide sequence portion
gcuuaauauuguuccugaguuu

SEQ ID NO: 1670 - RNA, 22 nt, Artificial Sequence
  SAMD9 targeting guide sequence portion
guccugcuaaaacucaggaaca

SEQ ID NO: 1671 - RNA, 22 nt, Artificial Sequence
  SAMD9 targeting guide sequence portion
guuccugaguuuuagcaggaca

SEQ ID NO: 1672 - RNA, 22 nt, Artificial Sequence
  SAMD9 targeting guide sequence portion
uaaaacucaggaacaauauuaa

SEQ ID NO: 1673 - RNA, 22 nt, Artificial Sequence
  SAMD9 targeting guide sequence portion
uaauauuguuccugaguuuuag

SEQ ID NO: 1674 - RNA, 22 nt, Artificial Sequence
  SAMD9 targeting guide sequence portion
uacuuuguccugcuaaaacuca

SEQ ID NO: 1675 - RNA, 22 nt, Artificial Sequence
  SAMD9 targeting guide sequence portion
uauuguuccugaguuuuagcag

SEQ ID NO: 1676 - RNA, 22 nt, Artificial Sequence
  SAMD9 targeting guide sequence portion
ucaggaacaauauuaagcaaaa

SEQ ID NO: 1677 - RNA, 22 nt, Artificial Sequence
  SAMD9 targeting guide sequence portion
ucauuuugcuuaauauuguucc

SEQ ID NO: 1678 - RNA, 22 nt, Artificial Sequence
  SAMD9 targeting guide sequence portion
uccugaguuuuagcaggacaaa

SEQ ID NO: 1679 - RNA, 22 nt, Artificial Sequence
  SAMD9 targeting guide sequence portion
uccugcuaaaacucaggaacaa

SEQ ID NO: 1680 - RNA, 22 nt, Artificial Sequence
  SAMD9 targeting guide sequence portion
ucuucauuuugcuuaauauugu

SEQ ID NO: 1681 - RNA, 22 nt, Artificial Sequence
  SAMD9 targeting guide sequence portion
ugaauacuuuguccugcuaaaa

SEQ ID NO: 1682 - RNA, 22 nt, Artificial Sequence
  SAMD9 targeting guide sequence portion
ugaguuuuagcaggacaaagua

SEQ ID NO: 1683 - RNA, 22 nt, Artificial Sequence
  SAMD9 targeting guide sequence portion
ugaugaauacuuuguccugcua

SEQ ID NO: 1684 - RNA, 22 nt, Artificial Sequence
  SAMD9 targeting guide sequence portion
ugcuaaaacucaggaacaauau

SEQ ID NO: 1685 - RNA, 22 nt, Artificial Sequence
  SAMD9 targeting guide sequence portion
ugcuuaauauuguuccugaguu

SEQ ID NO: 1686 - RNA, 22 nt, Artificial Sequence
  SAMD9 targeting guide sequence portion
uguccugcuaaaacucaggaac

SEQ ID NO: 1687 - RNA, 22 nt, Artificial Sequence
  SAMD9 targeting guide sequence portion
uguuccugaguuuuagcaggac

SEQ ID NO: 1688 - RNA, 22 nt, Artificial Sequence
  SAMD9 targeting guide sequence portion
uuaauauuguuccugaguuuua

SEQ ID NO: 1689 - RNA, 22 nt, Artificial Sequence
  SAMD9 targeting guide sequence portion
uucauuuugcuuaauauuguuc

SEQ ID NO: 1690 - RNA, 22 nt, Artificial Sequence
  SAMD9 targeting guide sequence portion
uuccugaguuuuagcaggacaa

SEQ ID NO: 1691 - RNA, 22 nt, Artificial Sequence
  SAMD9 targeting guide sequence portion
uugaugaauacuuuguccugcu

SEQ ID NO: 1692 - RNA, 22 nt, Artificial Sequence
  SAMD9 targeting guide sequence portion
uugcuuaauauuguuccugagu

SEQ ID NO: 1693 - RNA, 22 nt, Artificial Sequence
  SAMD9 targeting guide sequence portion
uuguccugcuaaaacucaggaa

SEQ ID NO: 1694 - RNA, 22 nt, Artificial Sequence
  SAMD9 targeting guide sequence portion
uuguuccugaguuuuagcagga

SEQ ID NO: 1695 - RNA, 22 nt, Artificial Sequence
  SAMD9 targeting guide sequence portion
uuugcuuaauauuguuccugag

SEQ ID NO: 1696 - RNA, 22 nt, Artificial Sequence
  SAMD9 targeting guide sequence portion
uuuguccugcuaaaacucagga

SEQ ID NO: 1697 - RNA, 22 nt, Artificial Sequence
  SAMD9 targeting guide sequence portion
uuuugcuuaauauuguuccuga

SEQ ID NO: 1698 - RNA, 20 nt, Artificial Sequence
  SAMD9 targeting guide sequence portion
aaacgaugaauauaaauuag

SEQ ID NO: 1699 - RNA, 20 nt, Artificial Sequence
  SAMD9 targeting guide sequence portion
aacgaugaauauaaauuagc

SEQ ID NO: 1700 - RNA, 20 nt, Artificial Sequence
  SAMD9 targeting guide sequence portion
aauuuauauucaucguuugg

SEQ ID NO: 1701 - RNA, 20 nt, Artificial Sequence
  SAMD9 targeting guide sequence portion
acgaugaauauaaauuagcc

SEQ ID NO: 1702 - RNA, 20 nt, Artificial Sequence
  SAMD9 targeting guide sequence portion
agggcuaauuuauauucauc

SEQ ID NO: 1703 - RNA, 20 nt, Artificial Sequence
  SAMD9 targeting guide sequence portion
aggggauccaaacgaugaau

SEQ ID NO: 1704 - RNA, 20 nt, Artificial Sequence
  SAMD9 targeting guide sequence portion
agugauauuccaggggaucc

SEQ ID NO: 1705 - RNA, 20 nt, Artificial Sequence
  SAMD9 targeting guide sequence portion
auauucaucguuuggauccc

SEQ ID NO: 1706 - RNA, 20 nt, Artificial Sequence
  SAMD9 targeting guide sequence portion
auauuccaggggauccaaac

SEQ ID NO: 1707 - RNA, 20 nt, Artificial Sequence
  SAMD9 targeting guide sequence portion
auccaaacgaugaauauaaa

SEQ ID NO: 1708 - RNA, 20 nt, Artificial Sequence
  SAMD9 targeting guide sequence portion
aucguuuggauccccuggaa

SEQ ID NO: 1709 - RNA, 20 nt, Artificial Sequence
  SAMD9 targeting guide sequence portion
auucaucguuuggauccccu

SEQ ID NO: 1710 - RNA, 20 nt, Artificial Sequence
  SAMD9 targeting guide sequence portion
auuccaggggauccaaacga

SEQ ID NO: 1711 - RNA, 20 nt, Artificial Sequence
  SAMD9 targeting guide sequence portion
auuuauauucaucguuugga

SEQ ID NO: 1712 - RNA, 20 nt, Artificial Sequence
  SAMD9 targeting guide sequence portion
caaacgaugaauauaaauua

SEQ ID NO: 1713 - RNA, 20 nt, Artificial Sequence
  SAMD9 targeting guide sequence portion
caggggauccaaacgaugaa

SEQ ID NO: 1714 - RNA, 20 nt, Artificial Sequence
  SAMD9 targeting guide sequence portion
caucguuuggauccccugga

SEQ ID NO: 1715 - RNA, 20 nt, Artificial Sequence
  SAMD9 targeting guide sequence portion
ccaaacgaugaauauaaauu

SEQ ID NO: 1716 - RNA, 20 nt, Artificial Sequence
  SAMD9 targeting guide sequence portion
ccaggggauccaaacgauga

SEQ ID NO: 1717 - RNA, 20 nt, Artificial Sequence
  SAMD9 targeting guide sequence portion
cgaugaauauaaauuagccc

SEQ ID NO: 1718 - RNA, 20 nt, Artificial Sequence
  SAMD9 targeting guide sequence portion
cguuuggauccccuggaaua

SEQ ID NO: 1719 - RNA, 20 nt, Artificial Sequence
  SAMD9 targeting guide sequence portion
cuaauuuauauucaucguuu

SEQ ID NO: 1720 - RNA, 20 nt, Artificial Sequence
  SAMD9 targeting guide sequence portion
gagggcuaauuuauauucau

SEQ ID NO: 1721 - RNA, 20 nt, Artificial Sequence
  SAMD9 targeting guide sequence portion
gauauuccaggggauccaaa

SEQ ID NO: 1722 - RNA, 20 nt, Artificial Sequence
  SAMD9 targeting guide sequence portion
gauccaaacgaugaauauaa

SEQ ID NO: 1723 - RNA, 20 nt, Artificial Sequence
  SAMD9 targeting guide sequence portion
gaugaauauaaauuagcccu

SEQ ID NO: 1724 - RNA, 20 nt, Artificial Sequence
  SAMD9 targeting guide sequence portion
gcuaauuuauauucaucguu

SEQ ID NO: 1725 - RNA, 20 nt, Artificial Sequence
  SAMD9 targeting guide sequence portion
ggauccaaacgaugaauaua

SEQ ID NO: 1726 - RNA, 20 nt, Artificial Sequence
  SAMD9 targeting guide sequence portion
ggcuaauuuauauucaucgu

SEQ ID NO: 1727 - RNA, 20 nt, Artificial Sequence
  SAMD9 targeting guide sequence portion
gggauccaaacgaugaauau

SEQ ID NO: 1728 - RNA, 20 nt, Artificial Sequence
  SAMD9 targeting guide sequence portion
gggcuaauuuauauucaucg

SEQ ID NO: 1729 - RNA, 20 nt, Artificial Sequence
  SAMD9 targeting guide sequence portion
ggggauccaaacgaugaaua

SEQ ID NO: 1730 - RNA, 20 nt, Artificial Sequence
  SAMD9 targeting guide sequence portion
gugauauuccaggggaucca

SEQ ID NO: 1731 - RNA, 20 nt, Artificial Sequence
  SAMD9 targeting guide sequence portion
uaauuuauauucaucguuug

SEQ ID NO: 1732 - RNA, 20 nt, Artificial Sequence
  SAMD9 targeting guide sequence portion
uagugauauuccaggggauc

SEQ ID NO: 1733 - RNA, 20 nt, Artificial Sequence
  SAMD9 targeting guide sequence portion
uauauucaucguuuggaucc

SEQ ID NO: 1734 - RNA, 20 nt, Artificial Sequence
  SAMD9 targeting guide sequence portion
uauucaucguuuggaucccc

SEQ ID NO: 1735 - RNA, 20 nt, Artificial Sequence
  SAMD9 targeting guide sequence portion
uauuccaggggauccaaacg

SEQ ID NO: 1736 - RNA, 20 nt, Artificial Sequence
  SAMD9 targeting guide sequence portion
ucaucguuuggauccccugg

SEQ ID NO: 1737 - RNA, 20 nt, Artificial Sequence
  SAMD9 targeting guide sequence portion
uccaaacgaugaauauaaau

SEQ ID NO: 1738 - RNA, 20 nt, Artificial Sequence
  SAMD9 targeting guide sequence portion
uccaggggauccaaacgaug

SEQ ID NO: 1739 - RNA, 20 nt, Artificial Sequence
  SAMD9 targeting guide sequence portion
ucguuuggauccccuggaau

SEQ ID NO: 1740 - RNA, 20 nt, Artificial Sequence
  SAMD9 targeting guide sequence portion
ugagggcuaauuuauauuca

SEQ ID NO: 1741 - RNA, 20 nt, Artificial Sequence
  SAMD9 targeting guide sequence portion
ugauauuccaggggauccaa

SEQ ID NO: 1742 - RNA, 20 nt, Artificial Sequence
  SAMD9 targeting guide sequence portion
uuauauucaucguuuggauc

SEQ ID NO: 1743 - RNA, 20 nt, Artificial Sequence
  SAMD9 targeting guide sequence portion
uucaucguuuggauccccug

SEQ ID NO: 1744 - RNA, 20 nt, Artificial Sequence
  SAMD9 targeting guide sequence portion
uuccaggggauccaaacgau

SEQ ID NO: 1745 - RNA, 20 nt, Artificial Sequence
  SAMD9 targeting guide sequence portion
uugagggcuaauuuauauuc

SEQ ID NO: 1746 - RNA, 20 nt, Artificial Sequence
  SAMD9 targeting guide sequence portion
uuuauauucaucguuuggau

SEQ ID NO: 1747 - RNA, 20 nt, Artificial Sequence
  SAMD9 targeting guide sequence portion
uuugagggcuaauuuauauu

SEQ ID NO: 1748 - RNA, 20 nt, Artificial Sequence
  SAMD9 targeting guide sequence portion
uuuugagggcuaauuuauau

SEQ ID NO: 1749 - RNA, 20 nt, Artificial Sequence
  SAMD9 targeting guide sequence portion
uuuuugagggcuaauuuaua

SEQ ID NO: 1750 - RNA, 21 nt, Artificial Sequence
  SAMD9 targeting guide sequence portion
aaacgaugaauauaaauuagc

SEQ ID NO: 1751 - RNA, 21 nt, Artificial Sequence
  SAMD9 targeting guide sequence portion
aacgaugaauauaaauuagcc

SEQ ID NO: 1752 - RNA, 21 nt, Artificial Sequence
  SAMD9 targeting guide sequence portion
aauuuauauucaucguuugga

SEQ ID NO: 1753 - RNA, 21 nt, Artificial Sequence
  SAMD9 targeting guide sequence portion
acgaugaauauaaauuagccc

SEQ ID NO: 1754 - RNA, 21 nt, Artificial Sequence
  SAMD9 targeting guide sequence portion
agggcuaauuuauauucaucg

SEQ ID NO: 1755 - RNA, 21 nt, Artificial Sequence
  SAMD9 targeting guide sequence portion
aggggauccaaacgaugaaua

SEQ ID NO: 1756 - RNA, 21 nt, Artificial Sequence
  SAMD9 targeting guide sequence portion
agugauauuccaggggaucca

SEQ ID NO: 1757 - RNA, 21 nt, Artificial Sequence
  SAMD9 targeting guide sequence portion
auauucaucguuuggaucccc

SEQ ID NO: 1758 - RNA, 21 nt, Artificial Sequence
  SAMD9 targeting guide sequence portion
auauuccaggggauccaaacg

SEQ ID NO: 1759 - RNA, 21 nt, Artificial Sequence
  SAMD9 targeting guide sequence portion
auccaaacgaugaauauaaau

SEQ ID NO: 1760 - RNA, 21 nt, Artificial Sequence
  SAMD9 targeting guide sequence portion
aucguuuggauccccuggaau

SEQ ID NO: 1761 - RNA, 21 nt, Artificial Sequence
  SAMD9 targeting guide sequence portion
auucaucguuuggauccccug

SEQ ID NO: 1762 - RNA, 21 nt, Artificial Sequence
  SAMD9 targeting guide sequence portion
auuccaggggauccaaacgau

SEQ ID NO: 1763 - RNA, 21 nt, Artificial Sequence
  SAMD9 targeting guide sequence portion
auuuauauucaucguuuggau

SEQ ID NO: 1764 - RNA, 21 nt, Artificial Sequence
  SAMD9 targeting guide sequence portion
caaacgaugaauauaaauuag

SEQ ID NO: 1765 - RNA, 21 nt, Artificial Sequence
  SAMD9 targeting guide sequence portion
caggggauccaaacgaugaau

SEQ ID NO: 1766 - RNA, 21 nt, Artificial Sequence
  SAMD9 targeting guide sequence portion
caucguuuggauccccuggaa

SEQ ID NO: 1767 - RNA, 21 nt, Artificial Sequence
  SAMD9 targeting guide sequence portion
ccaaacgaugaauauaaauua

SEQ ID NO: 1768 - RNA, 21 nt, Artificial Sequence
  SAMD9 targeting guide sequence portion
ccaggggauccaaacgaugaa

SEQ ID NO: 1769 - RNA, 21 nt, Artificial Sequence
  SAMD9 targeting guide sequence portion
cgaugaauauaaauuagcccu

SEQ ID NO: 1770 - RNA, 21 nt, Artificial Sequence
  SAMD9 targeting guide sequence portion
cguuuggauccccuggaauau

SEQ ID NO: 1771 - RNA, 21 nt, Artificial Sequence
  SAMD9 targeting guide sequence portion
cuaauuuauauucaucguuug

SEQ ID NO: 1772 - RNA, 21 nt, Artificial Sequence
  SAMD9 targeting guide sequence portion
gagggcuaauuuauauucauc

SEQ ID NO: 1773 - RNA, 21 nt, Artificial Sequence
  SAMD9 targeting guide sequence portion
gauauuccaggggauccaaac

SEQ ID NO: 1774 - RNA, 21 nt, Artificial Sequence
  SAMD9 targeting guide sequence portion
gauccaaacgaugaauauaaa

SEQ ID NO: 1775 - RNA, 21 nt, Artificial Sequence
  SAMD9 targeting guide sequence portion
gaugaauauaaauuagcccuc

SEQ ID NO: 1776 - RNA, 21 nt, Artificial Sequence
  SAMD9 targeting guide sequence portion
gcuaauuuauauucaucguuu

SEQ ID NO: 1777 - RNA, 21 nt, Artificial Sequence
  SAMD9 targeting guide sequence portion
ggauccaaacgaugaauauaa

SEQ ID NO: 1778 - RNA, 21 nt, Artificial Sequence
  SAMD9 targeting guide sequence portion
ggcuaauuuauauucaucguu

SEQ ID NO: 1779 - RNA, 21 nt, Artificial Sequence
  SAMD9 targeting guide sequence portion
gggauccaaacgaugaauaua

SEQ ID NO: 1780 - RNA, 21 nt, Artificial Sequence
  SAMD9 targeting guide sequence portion
gggcuaauuuauauucaucgu

SEQ ID NO: 1781 - RNA, 21 nt, Artificial Sequence
  SAMD9 targeting guide sequence portion
ggggauccaaacgaugaauau

SEQ ID NO: 1782 - RNA, 21 nt, Artificial Sequence
  SAMD9 targeting guide sequence portion
guagugauauuccaggggauc

SEQ ID NO: 1783 - RNA, 21 nt, Artificial Sequence
  SAMD9 targeting guide sequence portion
gugauauuccaggggauccaa

SEQ ID NO: 1784 - RNA, 21 nt, Artificial Sequence
  SAMD9 targeting guide sequence portion
guuuuugagggcuaauuuaua

SEQ ID NO: 1785 - RNA, 21 nt, Artificial Sequence
  SAMD9 targeting guide sequence portion
uaauuuauauucaucguuugg

SEQ ID NO: 1786 - RNA, 21 nt, Artificial Sequence
  SAMD9 targeting guide sequence portion
uagugauauuccaggggaucc

SEQ ID NO: 1787 - RNA, 21 nt, Artificial Sequence
  SAMD9 targeting guide sequence portion
uauauucaucguuuggauccc

SEQ ID NO: 1788 - RNA, 21 nt, Artificial Sequence
  SAMD9 targeting guide sequence portion
uauucaucguuuggauccccu

SEQ ID NO: 1789 - RNA, 21 nt, Artificial Sequence
  SAMD9 targeting guide sequence portion
uauuccaggggauccaaacga

SEQ ID NO: 1790 - RNA, 21 nt, Artificial Sequence
  SAMD9 targeting guide sequence portion
ucaucguuuggauccccugga

SEQ ID NO: 1791 - RNA, 21 nt, Artificial Sequence
  SAMD9 targeting guide sequence portion
uccaaacgaugaauauaaauu

SEQ ID NO: 1792 - RNA, 21 nt, Artificial Sequence
  SAMD9 targeting guide sequence portion
uccaggggauccaaacgauga

SEQ ID NO: 1793 - RNA, 21 nt, Artificial Sequence
  SAMD9 targeting guide sequence portion
ucguuuggauccccuggaaua

SEQ ID NO: 1794 - RNA, 21 nt, Artificial Sequence
  SAMD9 targeting guide sequence portion
ugagggcuaauuuauauucau

SEQ ID NO: 1795 - RNA, 21 nt, Artificial Sequence
  SAMD9 targeting guide sequence portion
ugauauuccaggggauccaaa

SEQ ID NO: 1796 - RNA, 21 nt, Artificial Sequence
  SAMD9 targeting guide sequence portion
uuauauucaucguuuggaucc

SEQ ID NO: 1797 - RNA, 21 nt, Artificial Sequence
  SAMD9 targeting guide sequence portion
uucaucguuuggauccccugg

SEQ ID NO: 1798 - RNA, 21 nt, Artificial Sequence
  SAMD9 targeting guide sequence portion
uuccaggggauccaaacgaug

SEQ ID NO: 1799 - RNA, 21 nt, Artificial Sequence
  SAMD9 targeting guide sequence portion
uugagggcuaauuuauauuca

SEQ ID NO: 1800 - RNA, 21 nt, Artificial Sequence
  SAMD9 targeting guide sequence portion
uuuauauucaucguuuggauc

SEQ ID NO: 1801 - RNA, 21 nt, Artificial Sequence
  SAMD9 targeting guide sequence portion
uuugagggcuaauuuauauuc

SEQ ID NO: 1802 - RNA, 21 nt, Artificial Sequence
  SAMD9 targeting guide sequence portion
uuuugagggcuaauuuauauu

SEQ ID NO: 1803 - RNA, 21 nt, Artificial Sequence
  SAMD9 targeting guide sequence portion
uuuuugagggcuaauuuauau

SEQ ID NO: 1804 - RNA, 22 nt, Artificial Sequence
  SAMD9 targeting guide sequence portion
aaacgaugaauauaaauuagcc

SEQ ID NO: 1805 - RNA, 22 nt, Artificial Sequence
  SAMD9 targeting guide sequence portion
aacgaugaauauaaauuagccc

SEQ ID NO: 1806 - RNA, 22 nt, Artificial Sequence
  SAMD9 targeting guide sequence portion
aauuuauauucaucguuuggau

SEQ ID NO: 1807 - RNA, 22 nt, Artificial Sequence
  SAMD9 targeting guide sequence portion
acgaugaauauaaauuagcccu

SEQ ID NO: 1808 - RNA, 22 nt, Artificial Sequence
  SAMD9 targeting guide sequence portion
agggcuaauuuauauucaucgu

SEQ ID NO: 1809 - RNA, 22 nt, Artificial Sequence
  SAMD9 targeting guide sequence portion
aggggauccaaacgaugaauau

SEQ ID NO: 1810 - RNA, 22 nt, Artificial Sequence
  SAMD9 targeting guide sequence portion
aguagugauauuccaggggauc

SEQ ID NO: 1811 - RNA, 22 nt, Artificial Sequence
  SAMD9 targeting guide sequence portion
agugauauuccaggggauccaa

SEQ ID NO: 1812 - RNA, 22 nt, Artificial Sequence
  SAMD9 targeting guide sequence portion
aguuuuugagggcuaauuuaua

SEQ ID NO: 1813 - RNA, 22 nt, Artificial Sequence
  SAMD9 targeting guide sequence portion
auauucaucguuuggauccccu

SEQ ID NO: 1814 - RNA, 22 nt, Artificial Sequence
  SAMD9 targeting guide sequence portion
auauuccaggggauccaaacga

SEQ ID NO: 1815 - RNA, 22 nt, Artificial Sequence
  SAMD9 targeting guide sequence portion
auccaaacgaugaauauaaauu

SEQ ID NO: 1816 - RNA, 22 nt, Artificial Sequence
  SAMD9 targeting guide sequence portion
aucguuuggauccccuggaaua

SEQ ID NO: 1817 - RNA, 22 nt, Artificial Sequence
  SAMD9 targeting guide sequence portion
auucaucguuuggauccccugg

SEQ ID NO: 1818 - RNA, 22 nt, Artificial Sequence
  SAMD9 targeting guide sequence portion
auuccaggggauccaaacgaug

SEQ ID NO: 1819 - RNA, 22 nt, Artificial Sequence
  SAMD9 targeting guide sequence portion
auuuauauucaucguuuggauc

SEQ ID NO: 1820 - RNA, 22 nt, Artificial Sequence
  SAMD9 targeting guide sequence portion
caaacgaugaauauaaauuagc

SEQ ID NO: 1821 - RNA, 22 nt, Artificial Sequence
  SAMD9 targeting guide sequence portion
caggggauccaaacgaugaaua

SEQ ID NO: 1822 - RNA, 22 nt, Artificial Sequence
  SAMD9 targeting guide sequence portion
caucguuuggauccccuggaau

SEQ ID NO: 1823 - RNA, 22 nt, Artificial Sequence
  SAMD9 targeting guide sequence portion
ccaaacgaugaauauaaauuag

SEQ ID NO: 1824 - RNA, 22 nt, Artificial Sequence
  SAMD9 targeting guide sequence portion
ccaggggauccaaacgaugaau

SEQ ID NO: 1825 - RNA, 22 nt, Artificial Sequence
  SAMD9 targeting guide sequence portion
cgaugaauauaaauuagcccuc

SEQ ID NO: 1826 - RNA, 22 nt, Artificial Sequence
  SAMD9 targeting guide sequence portion
cguuuggauccccuggaauauc

SEQ ID NO: 1827 - RNA, 22 nt, Artificial Sequence
  SAMD9 targeting guide sequence portion
cuaauuuauauucaucguuugg

SEQ ID NO: 1828 - RNA, 22 nt, Artificial Sequence
  SAMD9 targeting guide sequence portion
gagggcuaauuuauauucaucg

SEQ ID NO: 1829 - RNA, 22 nt, Artificial Sequence
  SAMD9 targeting guide sequence portion
gauauuccaggggauccaaacg

SEQ ID NO: 1830 - RNA, 22 nt, Artificial Sequence
  SAMD9 targeting guide sequence portion
gauccaaacgaugaauauaaau

SEQ ID NO: 1831 - RNA, 22 nt, Artificial Sequence
  SAMD9 targeting guide sequence portion
gaugaauauaaauuagcccuca

SEQ ID NO: 1832 - RNA, 22 nt, Artificial Sequence
  SAMD9 targeting guide sequence portion
gcuaauuuauauucaucguuug

SEQ ID NO: 1833 - RNA, 22 nt, Artificial Sequence
  SAMD9 targeting guide sequence portion
ggauccaaacgaugaauauaaa

SEQ ID NO: 1834 - RNA, 22 nt, Artificial Sequence
  SAMD9 targeting guide sequence portion
ggcuaauuuauauucaucguuu

SEQ ID NO: 1835 - RNA, 22 nt, Artificial Sequence
  SAMD9 targeting guide sequence portion
gggauccaaacgaugaauauaa

SEQ ID NO: 1836 - RNA, 22 nt, Artificial Sequence
  SAMD9 targeting guide sequence portion
gggcuaauuuauauucaucguu

SEQ ID NO: 1837 - RNA, 22 nt, Artificial Sequence
  SAMD9 targeting guide sequence portion
ggggauccaaacgaugaauaua

SEQ ID NO: 1838 - RNA, 22 nt, Artificial Sequence
  SAMD9 targeting guide sequence portion
guagugauauuccaggggaucc

SEQ ID NO: 1839 - RNA, 22 nt, Artificial Sequence
  SAMD9 targeting guide sequence portion
gugauauuccaggggauccaaa

SEQ ID NO: 1840 - RNA, 22 nt, Artificial Sequence
  SAMD9 targeting guide sequence portion
guuuuugagggcuaauuuauau

SEQ ID NO: 1841 - RNA, 22 nt, Artificial Sequence
  SAMD9 targeting guide sequence portion
uaauuuauauucaucguuugga

SEQ ID NO: 1842 - RNA, 22 nt, Artificial Sequence
  SAMD9 targeting guide sequence portion
uagugauauuccaggggaucca

SEQ ID NO: 1843 - RNA, 22 nt, Artificial Sequence
  SAMD9 targeting guide sequence portion
uauauucaucguuuggaucccc

SEQ ID NO: 1844 - RNA, 22 nt, Artificial Sequence
  SAMD9 targeting guide sequence portion
uauucaucguuuggauccccug

SEQ ID NO: 1845 - RNA, 22 nt, Artificial Sequence
  SAMD9 targeting guide sequence portion
uauuccaggggauccaaacgau

SEQ ID NO: 1846 - RNA, 22 nt, Artificial Sequence
  SAMD9 targeting guide sequence portion
ucaucguuuggauccccuggaa

SEQ ID NO: 1847 - RNA, 22 nt, Artificial Sequence
  SAMD9 targeting guide sequence portion
uccaaacgaugaauauaaauua

SEQ ID NO: 1848 - RNA, 22 nt, Artificial Sequence
  SAMD9 targeting guide sequence portion
uccaggggauccaaacgaugaa

SEQ ID NO: 1849 - RNA, 22 nt, Artificial Sequence
  SAMD9 targeting guide sequence portion
ucguuuggauccccuggaauau

SEQ ID NO: 1850 - RNA, 22 nt, Artificial Sequence
  SAMD9 targeting guide sequence portion
ugagggcuaauuuauauucauc

SEQ ID NO: 1851 - RNA, 22 nt, Artificial Sequence
  SAMD9 targeting guide sequence portion
ugauauuccaggggauccaaac

SEQ ID NO: 1852 - RNA, 22 nt, Artificial Sequence
  SAMD9 targeting guide sequence portion
uuauauucaucguuuggauccc

SEQ ID NO: 1853 - RNA, 22 nt, Artificial Sequence
  SAMD9 targeting guide sequence portion
uucaucguuuggauccccugga

SEQ ID NO: 1854 - RNA, 22 nt, Artificial Sequence
  SAMD9 targeting guide sequence portion
uuccaggggauccaaacgauga

SEQ ID NO: 1855 - RNA, 22 nt, Artificial Sequence
  SAMD9 targeting guide sequence portion
uugagggcuaauuuauauucau

SEQ ID NO: 1856 - RNA, 22 nt, Artificial Sequence
  SAMD9 targeting guide sequence portion
uuuauauucaucguuuggaucc

SEQ ID NO: 1857 - RNA, 22 nt, Artificial Sequence
  SAMD9 targeting guide sequence portion
uuugagggcuaauuuauauuca

SEQ ID NO: 1858 - RNA, 22 nt, Artificial Sequence
  SAMD9 targeting guide sequence portion
uuuugagggcuaauuuauauuc

SEQ ID NO: 1859 - RNA, 22 nt, Artificial Sequence
  SAMD9 targeting guide sequence portion
uuuuugagggcuaauuuauauu

SEQ ID NO: 1860 - RNA, 20 nt, Artificial Sequence
  SAMD9 targeting guide sequence portion
aaccaacuauauuguaagua

SEQ ID NO: 1861 - RNA, 20 nt, Artificial Sequence
  SAMD9 targeting guide sequence portion
aacuauauuguaaguaucau

SEQ ID NO: 1862 - RNA, 20 nt, Artificial Sequence
  SAMD9 targeting guide sequence portion
aacuucuaucucuccuugau

SEQ ID NO: 1863 - RNA, 20 nt, Artificial Sequence
  SAMD9 targeting guide sequence portion
aauauaguugguuaucaagg

SEQ ID NO: 1864 - RNA, 20 nt, Artificial Sequence
  SAMD9 targeting guide sequence portion
acaauauaguugguuaucaa

SEQ ID NO: 1865 - RNA, 20 nt, Artificial Sequence
  SAMD9 targeting guide sequence portion
accaacuauauuguaaguau

SEQ ID NO: 1866 - RNA, 20 nt, Artificial Sequence
  SAMD9 targeting guide sequence portion
acuauauuguaaguaucaua

SEQ ID NO: 1867 - RNA, 20 nt, Artificial Sequence
  SAMD9 targeting guide sequence portion
acuuacaauauaguugguua

SEQ ID NO: 1868 - RNA, 20 nt, Artificial Sequence
  SAMD9 targeting guide sequence portion
acuucuaucucuccuugaua

SEQ ID NO: 1869 - RNA, 20 nt, Artificial Sequence
  SAMD9 targeting guide sequence portion
aggcgguaugauacuuacaa

SEQ ID NO: 1870 - RNA, 20 nt, Artificial Sequence
  SAMD9 targeting guide sequence portion
aguugguuaucaaggagaga

SEQ ID NO: 1871 - RNA, 20 nt, Artificial Sequence
  SAMD9 targeting guide sequence portion
auaaccaacuauauuguaag

SEQ ID NO: 1872 - RNA, 20 nt, Artificial Sequence
  SAMD9 targeting guide sequence portion
auacuuacaauauaguuggu

SEQ ID NO: 1873 - RNA, 20 nt, Artificial Sequence
  SAMD9 targeting guide sequence portion
auaguugguuaucaaggaga

SEQ ID NO: 1874 - RNA, 20 nt, Artificial Sequence
  SAMD9 targeting guide sequence portion
auauaguugguuaucaagga

SEQ ID NO: 1875 - RNA, 20 nt, Artificial Sequence
  SAMD9 targeting guide sequence portion
aucucuccuugauaaccaac

SEQ ID NO: 1876 - RNA, 20 nt, Artificial Sequence
  SAMD9 targeting guide sequence portion
augauacuuacaauauaguu

SEQ ID NO: 1877 - RNA, 20 nt, Artificial Sequence
  SAMD9 targeting guide sequence portion
caacuauauuguaaguauca

SEQ ID NO: 1878 - RNA, 20 nt, Artificial Sequence
  SAMD9 targeting guide sequence portion
caauauaguugguuaucaag

SEQ ID NO: 1879 - RNA, 20 nt, Artificial Sequence
  SAMD9 targeting guide sequence portion
ccaacuauauuguaaguauc

SEQ ID NO: 1880 - RNA, 20 nt, Artificial Sequence
  SAMD9 targeting guide sequence portion
ccuugauaaccaacuauauu

SEQ ID NO: 1881 - RNA, 20 nt, Artificial Sequence
  SAMD9 targeting guide sequence portion
cgguaugauacuuacaauau

SEQ ID NO: 1882 - RNA, 20 nt, Artificial Sequence
  SAMD9 targeting guide sequence portion
cuaucucuccuugauaacca

SEQ ID NO: 1883 - RNA, 20 nt, Artificial Sequence
  SAMD9 targeting guide sequence portion
cuccuugauaaccaacuaua

SEQ ID NO: 1884 - RNA, 20 nt, Artificial Sequence
  SAMD9 targeting guide sequence portion
cucuccuugauaaccaacua

SEQ ID NO: 1885 - RNA, 20 nt, Artificial Sequence
  SAMD9 targeting guide sequence portion
cuuacaauauaguugguuau

SEQ ID NO: 1886 - RNA, 20 nt, Artificial Sequence
  SAMD9 targeting guide sequence portion
cuucuaucucuccuugauaa

SEQ ID NO: 1887 - RNA, 20 nt, Artificial Sequence
  SAMD9 targeting guide sequence portion
cuugauaaccaacuauauug

SEQ ID NO: 1888 - RNA, 20 nt, Artificial Sequence
  SAMD9 targeting guide sequence portion
gauaaccaacuauauuguaa

SEQ ID NO: 1889 - RNA, 20 nt, Artificial Sequence
  SAMD9 targeting guide sequence portion
gauacuuacaauauaguugg

SEQ ID NO: 1890 - RNA, 20 nt, Artificial Sequence
  SAMD9 targeting guide sequence portion
gcgguaugauacuuacaaua

SEQ ID NO: 1891 - RNA, 20 nt, Artificial Sequence
  SAMD9 targeting guide sequence portion
ggcgguaugauacuuacaau

SEQ ID NO: 1892 - RNA, 20 nt, Artificial Sequence
  SAMD9 targeting guide sequence portion
gguaugauacuuacaauaua

SEQ ID NO: 1893 - RNA, 20 nt, Artificial Sequence
  SAMD9 targeting guide sequence portion
guaugauacuuacaauauag

SEQ ID NO: 1894 - RNA, 20 nt, Artificial Sequence
  SAMD9 targeting guide sequence portion
guugguuaucaaggagagau

SEQ ID NO: 1895 - RNA, 20 nt, Artificial Sequence
  SAMD9 targeting guide sequence portion
uaaccaacuauauuguaagu

SEQ ID NO: 1896 - RNA, 20 nt, Artificial Sequence
  SAMD9 targeting guide sequence portion
uacaauauaguugguuauca

SEQ ID NO: 1897 - RNA, 20 nt, Artificial Sequence
  SAMD9 targeting guide sequence portion
uacuuacaauauaguugguu

SEQ ID NO: 1898 - RNA, 20 nt, Artificial Sequence
  SAMD9 targeting guide sequence portion
uaguugguuaucaaggagag

SEQ ID NO: 1899 - RNA, 20 nt, Artificial Sequence
  SAMD9 targeting guide sequence portion
uauaguugguuaucaaggag

SEQ ID NO: 1900 - RNA, 20 nt, Artificial Sequence
  SAMD9 targeting guide sequence portion
uaucucuccuugauaaccaa

SEQ ID NO: 1901 - RNA, 20 nt, Artificial Sequence
  SAMD9 targeting guide sequence portion
uaugauacuuacaauauagu

SEQ ID NO: 1902 - RNA, 20 nt, Artificial Sequence
  SAMD9 targeting guide sequence portion
uccuugauaaccaacuauau

SEQ ID NO: 1903 - RNA, 20 nt, Artificial Sequence
  SAMD9 targeting guide sequence portion
ucuaucucuccuugauaacc

SEQ ID NO: 1904 - RNA, 20 nt, Artificial Sequence
  SAMD9 targeting guide sequence portion
ucuccuugauaaccaacuau

SEQ ID NO: 1905 - RNA, 20 nt, Artificial Sequence
  SAMD9 targeting guide sequence portion
ucucuccuugauaaccaacu

SEQ ID NO: 1906 - RNA, 20 nt, Artificial Sequence
  SAMD9 targeting guide sequence portion
ugauaaccaacuauauugua

SEQ ID NO: 1907 - RNA, 20 nt, Artificial Sequence
  SAMD9 targeting guide sequence portion
ugauacuuacaauauaguug

SEQ ID NO: 1908 - RNA, 20 nt, Artificial Sequence
  SAMD9 targeting guide sequence portion
uuacaauauaguugguuauc

SEQ ID NO: 1909 - RNA, 20 nt, Artificial Sequence
  SAMD9 targeting guide sequence portion
uucuaucucuccuugauaac

SEQ ID NO: 1910 - RNA, 20 nt, Artificial Sequence
  SAMD9 targeting guide sequence portion
uugauaaccaacuauauugu

SEQ ID NO: 1911 - RNA, 20 nt, Artificial Sequence
  SAMD9 targeting guide sequence portion
uugguuaucaaggagagaua

SEQ ID NO: 1912 - RNA, 21 nt, Artificial Sequence
  SAMD9 targeting guide sequence portion
aaccaacuauauuguaaguau

SEQ ID NO: 1913 - RNA, 21 nt, Artificial Sequence
  SAMD9 targeting guide sequence portion
aacuucuaucucuccuugaua

SEQ ID NO: 1914 - RNA, 21 nt, Artificial Sequence
  SAMD9 targeting guide sequence portion
aaggcgguaugauacuuacaa

SEQ ID NO: 1915 - RNA, 21 nt, Artificial Sequence
  SAMD9 targeting guide sequence portion
aauauaguugguuaucaagga

SEQ ID NO: 1916 - RNA, 21 nt, Artificial Sequence
  SAMD9 targeting guide sequence portion
acaauauaguugguuaucaag

SEQ ID NO: 1917 - RNA, 21 nt, Artificial Sequence
  SAMD9 targeting guide sequence portion
accaacuauauuguaaguauc

SEQ ID NO: 1918 - RNA, 21 nt, Artificial Sequence
  SAMD9 targeting guide sequence portion
acuauauuguaaguaucauac

SEQ ID NO: 1919 - RNA, 21 nt, Artificial Sequence
  SAMD9 targeting guide sequence portion
acuuacaauauaguugguuau

SEQ ID NO: 1920 - RNA, 21 nt, Artificial Sequence
  SAMD9 targeting guide sequence portion
acuucuaucucuccuugauaa

SEQ ID NO: 1921 - RNA, 21 nt, Artificial Sequence
  SAMD9 targeting guide sequence portion
aggcgguaugauacuuacaau

SEQ ID NO: 1922 - RNA, 21 nt, Artificial Sequence
  SAMD9 targeting guide sequence portion
aguugguuaucaaggagagau

SEQ ID NO: 1923 - RNA, 21 nt, Artificial Sequence
  SAMD9 targeting guide sequence portion
auaaccaacuauauuguaagu

SEQ ID NO: 1924 - RNA, 21 nt, Artificial Sequence
  SAMD9 targeting guide sequence portion
auacuuacaauauaguugguu

SEQ ID NO: 1925 - RNA, 21 nt, Artificial Sequence
  SAMD9 targeting guide sequence portion
auaguugguuaucaaggagag

SEQ ID NO: 1926 - RNA, 21 nt, Artificial Sequence
  SAMD9 targeting guide sequence portion
auauaguugguuaucaaggag

SEQ ID NO: 1927 - RNA, 21 nt, Artificial Sequence
  SAMD9 targeting guide sequence portion
aucucuccuugauaaccaacu

SEQ ID NO: 1928 - RNA, 21 nt, Artificial Sequence
  SAMD9 targeting guide sequence portion
augauacuuacaauauaguug

SEQ ID NO: 1929 - RNA, 21 nt, Artificial Sequence
  SAMD9 targeting guide sequence portion
caacuauauuguaaguaucau

SEQ ID NO: 1930 - RNA, 21 nt, Artificial Sequence
  SAMD9 targeting guide sequence portion
caacuucuaucucuccuugau

SEQ ID NO: 1931 - RNA, 21 nt, Artificial Sequence
  SAMD9 targeting guide sequence portion
caauauaguugguuaucaagg

SEQ ID NO: 1932 - RNA, 21 nt, Artificial Sequence
  SAMD9 targeting guide sequence portion
ccaacuauauuguaaguauca

SEQ ID NO: 1933 - RNA, 21 nt, Artificial Sequence
  SAMD9 targeting guide sequence portion
ccuugauaaccaacuauauug

SEQ ID NO: 1934 - RNA, 21 nt, Artificial Sequence
  SAMD9 targeting guide sequence portion
cgguaugauacuuacaauaua

SEQ ID NO: 1935 - RNA, 21 nt, Artificial Sequence
  SAMD9 targeting guide sequence portion
cuaucucuccuugauaaccaa

SEQ ID NO: 1936 - RNA, 21 nt, Artificial Sequence
  SAMD9 targeting guide sequence portion
cuccuugauaaccaacuauau

SEQ ID NO: 1937 - RNA, 21 nt, Artificial Sequence
  SAMD9 targeting guide sequence portion
cucuccuugauaaccaacuau

SEQ ID NO: 1938 - RNA, 21 nt, Artificial Sequence
  SAMD9 targeting guide sequence portion
cuuacaauauaguugguuauc

SEQ ID NO: 1939 - RNA, 21 nt, Artificial Sequence
  SAMD9 targeting guide sequence portion
cuucuaucucuccuugauaac

SEQ ID NO: 1940 - RNA, 21 nt, Artificial Sequence
  SAMD9 targeting guide sequence portion
cuugauaaccaacuauauugu

SEQ ID NO: 1941 - RNA, 21 nt, Artificial Sequence
  SAMD9 targeting guide sequence portion
gauaaccaacuauauuguaag

SEQ ID NO: 1942 - RNA, 21 nt, Artificial Sequence
  SAMD9 targeting guide sequence portion
gauacuuacaauauaguuggu

SEQ ID NO: 1943 - RNA, 21 nt, Artificial Sequence
  SAMD9 targeting guide sequence portion
gcgguaugauacuuacaauau

SEQ ID NO: 1944 - RNA, 21 nt, Artificial Sequence
  SAMD9 targeting guide sequence portion
ggcgguaugauacuuacaaua

SEQ ID NO: 1945 - RNA, 21 nt, Artificial Sequence
  SAMD9 targeting guide sequence portion
gguaugauacuuacaauauag

SEQ ID NO: 1946 - RNA, 21 nt, Artificial Sequence
  SAMD9 targeting guide sequence portion
guaugauacuuacaauauagu

SEQ ID NO: 1947 - RNA, 21 nt, Artificial Sequence
  SAMD9 targeting guide sequence portion
guugguuaucaaggagagaua

SEQ ID NO: 1948 - RNA, 21 nt, Artificial Sequence
  SAMD9 targeting guide sequence portion
uaaccaacuauauuguaagua

SEQ ID NO: 1949 - RNA, 21 nt, Artificial Sequence
  SAMD9 targeting guide sequence portion
uacaauauaguugguuaucaa

SEQ ID NO: 1950 - RNA, 21 nt, Artificial Sequence
  SAMD9 targeting guide sequence portion
uacuuacaauauaguugguua

SEQ ID NO: 1951 - RNA, 21 nt, Artificial Sequence
  SAMD9 targeting guide sequence portion
uaguugguuaucaaggagaga

SEQ ID NO: 1952 - RNA, 21 nt, Artificial Sequence
  SAMD9 targeting guide sequence portion
uauaguugguuaucaaggaga

SEQ ID NO: 1953 - RNA, 21 nt, Artificial Sequence
  SAMD9 targeting guide sequence portion
uaucucuccuugauaaccaac

SEQ ID NO: 1954 - RNA, 21 nt, Artificial Sequence
  SAMD9 targeting guide sequence portion
uccuugauaaccaacuauauu

SEQ ID NO: 1955 - RNA, 21 nt, Artificial Sequence
  SAMD9 targeting guide sequence portion
ucuaucucuccuugauaacca

SEQ ID NO: 1956 - RNA, 21 nt, Artificial Sequence
  SAMD9 targeting guide sequence portion
ucuccuugauaaccaacuaua

SEQ ID NO: 1957 - RNA, 21 nt, Artificial Sequence
  SAMD9 targeting guide sequence portion
ucucuccuugauaaccaacua

SEQ ID NO: 1958 - RNA, 21 nt, Artificial Sequence
  SAMD9 targeting guide sequence portion
ugauaaccaacuauauuguaa

SEQ ID NO: 1959 - RNA, 21 nt, Artificial Sequence
  SAMD9 targeting guide sequence portion
ugauacuuacaauauaguugg

SEQ ID NO: 1960 - RNA, 21 nt, Artificial Sequence
  SAMD9 targeting guide sequence portion
uuacaauauaguugguuauca

SEQ ID NO: 1961 - RNA, 21 nt, Artificial Sequence
  SAMD9 targeting guide sequence portion
uucuaucucuccuugauaacc

SEQ ID NO: 1962 - RNA, 21 nt, Artificial Sequence
  SAMD9 targeting guide sequence portion
uugauaaccaacuauauugua

SEQ ID NO: 1963 - RNA, 21 nt, Artificial Sequence
  SAMD9 targeting guide sequence portion
uugguuaucaaggagagauag

SEQ ID NO: 1964 - RNA, 22 nt, Artificial Sequence
  SAMD9 targeting guide sequence portion
aaaggcgguaugauacuuacaa

SEQ ID NO: 1965 - RNA, 22 nt, Artificial Sequence
  SAMD9 targeting guide sequence portion
aaccaacuauauuguaaguauc

SEQ ID NO: 1966 - RNA, 22 nt, Artificial Sequence
  SAMD9 targeting guide sequence portion
aacuauauuguaaguaucauac

SEQ ID NO: 1967 - RNA, 22 nt, Artificial Sequence
  SAMD9 targeting guide sequence portion
aacuucuaucucuccuugauaa

SEQ ID NO: 1968 - RNA, 22 nt, Artificial Sequence
  SAMD9 targeting guide sequence portion
aaggcgguaugauacuuacaau

SEQ ID NO: 1969 - RNA, 22 nt, Artificial Sequence
  SAMD9 targeting guide sequence portion
aauauaguugguuaucaaggag

SEQ ID NO: 1970 - RNA, 22 nt, Artificial Sequence
  SAMD9 targeting guide sequence portion
acaauauaguugguuaucaagg

SEQ ID NO: 1971 - RNA, 22 nt, Artificial Sequence
  SAMD9 targeting guide sequence portion
accaacuauauuguaaguauca

SEQ ID NO: 1972 - RNA, 22 nt, Artificial Sequence
  SAMD9 targeting guide sequence portion
acuauauuguaaguaucauacc

SEQ ID NO: 1973 - RNA, 22 nt, Artificial Sequence
  SAMD9 targeting guide sequence portion
acuuacaauauaguugguuauc

SEQ ID NO: 1974 - RNA, 22 nt, Artificial Sequence
  SAMD9 targeting guide sequence portion
acuucuaucucuccuugauaac

SEQ ID NO: 1975 - RNA, 22 nt, Artificial Sequence
  SAMD9 targeting guide sequence portion
aggcgguaugauacuuacaaua

SEQ ID NO: 1976 - RNA, 22 nt, Artificial Sequence
  SAMD9 targeting guide sequence portion
aguugguuaucaaggagagaua

SEQ ID NO: 1977 - RNA, 22 nt, Artificial Sequence
  SAMD9 targeting guide sequence portion
auaaccaacuauauuguaagua

SEQ ID NO: 1978 - RNA, 22 nt, Artificial Sequence
  SAMD9 targeting guide sequence portion
auacuuacaauauaguugguua

SEQ ID NO: 1979 - RNA, 22 nt, Artificial Sequence
  SAMD9 targeting guide sequence portion
auaguugguuaucaaggagaga

SEQ ID NO: 1980 - RNA, 22 nt, Artificial Sequence
  SAMD9 targeting guide sequence portion
auauaguugguuaucaaggaga

SEQ ID NO: 1981 - RNA, 22 nt, Artificial Sequence
  SAMD9 targeting guide sequence portion
aucucuccuugauaaccaacua

SEQ ID NO: 1982 - RNA, 22 nt, Artificial Sequence
  SAMD9 targeting guide sequence portion
augauacuuacaauauaguugg

SEQ ID NO: 1983 - RNA, 22 nt, Artificial Sequence
  SAMD9 targeting guide sequence portion
caacuauauuguaaguaucaua

SEQ ID NO: 1984 - RNA, 22 nt, Artificial Sequence
  SAMD9 targeting guide sequence portion
caacuucuaucucuccuugaua

SEQ ID NO: 1985 - RNA, 22 nt, Artificial Sequence
  SAMD9 targeting guide sequence portion
caauauaguugguuaucaagga

SEQ ID NO: 1986 - RNA, 22 nt, Artificial Sequence
  SAMD9 targeting guide sequence portion
ccaacuauauuguaaguaucau

SEQ ID NO: 1987 - RNA, 22 nt, Artificial Sequence
  SAMD9 targeting guide sequence portion
ccaacuucuaucucuccuugau

SEQ ID NO: 1988 - RNA, 22 nt, Artificial Sequence
  SAMD9 targeting guide sequence portion
ccuugauaaccaacuauauugu

SEQ ID NO: 1989 - RNA, 22 nt, Artificial Sequence
  SAMD9 targeting guide sequence portion
cgguaugauacuuacaauauag

SEQ ID NO: 1990 - RNA, 22 nt, Artificial Sequence
  SAMD9 targeting guide sequence portion
cuaucucuccuugauaaccaac

SEQ ID NO: 1991 - RNA, 22 nt, Artificial Sequence
  SAMD9 targeting guide sequence portion
cuccuugauaaccaacuauauu

SEQ ID NO: 1992 - RNA, 22 nt, Artificial Sequence
  SAMD9 targeting guide sequence portion
cucuccuugauaaccaacuaua

SEQ ID NO: 1993 - RNA, 22 nt, Artificial Sequence
  SAMD9 targeting guide sequence portion
cuuacaauauaguugguuauca

SEQ ID NO: 1994 - RNA, 22 nt, Artificial Sequence
  SAMD9 targeting guide sequence portion
cuucuaucucuccuugauaacc

SEQ ID NO: 1995 - RNA, 22 nt, Artificial Sequence
  SAMD9 targeting guide sequence portion
cuugauaaccaacuauauugua

SEQ ID NO: 1996 - RNA, 22 nt, Artificial Sequence
  SAMD9 targeting guide sequence portion
gauaaccaacuauauuguaagu

SEQ ID NO: 1997 - RNA, 22 nt, Artificial Sequence
  SAMD9 targeting guide sequence portion
gauacuuacaauauaguugguu

SEQ ID NO: 1998 - RNA, 22 nt, Artificial Sequence
  SAMD9 targeting guide sequence portion
gcgguaugauacuuacaauaua

SEQ ID NO: 1999 - RNA, 22 nt, Artificial Sequence
  SAMD9 targeting guide sequence portion
ggcgguaugauacuuacaauau

SEQ ID NO: 2000 - RNA, 22 nt, Artificial Sequence
  SAMD9 targeting guide sequence portion
gguaugauacuuacaauauagu

SEQ ID NO: 2001 - RNA, 22 nt, Artificial Sequence
  SAMD9 targeting guide sequence portion
guaugauacuuacaauauaguu

SEQ ID NO: 2002 - RNA, 22 nt, Artificial Sequence
  SAMD9 targeting guide sequence portion
guugguuaucaaggagagauag

SEQ ID NO: 2003 - RNA, 22 nt, Artificial Sequence
  SAMD9 targeting guide sequence portion
uaaccaacuauauuguaaguau

SEQ ID NO: 2004 - RNA, 22 nt, Artificial Sequence
  SAMD9 targeting guide sequence portion
uacaauauaguugguuaucaag

SEQ ID NO: 2005 - RNA, 22 nt, Artificial Sequence
  SAMD9 targeting guide sequence portion
uacuuacaauauaguugguuau

SEQ ID NO: 2006 - RNA, 22 nt, Artificial Sequence
  SAMD9 targeting guide sequence portion
uaguugguuaucaaggagagau

SEQ ID NO: 2007 - RNA, 22 nt, Artificial Sequence
  SAMD9 targeting guide sequence portion
uauaguugguuaucaaggagag

SEQ ID NO: 2008 - RNA, 22 nt, Artificial Sequence
  SAMD9 targeting guide sequence portion
uaucucuccuugauaaccaacu

SEQ ID NO: 2009 - RNA, 22 nt, Artificial Sequence
  SAMD9 targeting guide sequence portion
uaugauacuuacaauauaguug

SEQ ID NO: 2010 - RNA, 22 nt, Artificial Sequence
  SAMD9 targeting guide sequence portion
uccuugauaaccaacuauauug

SEQ ID NO: 2011 - RNA, 22 nt, Artificial Sequence
  SAMD9 targeting guide sequence portion
ucuaucucuccuugauaaccaa

SEQ ID NO: 2012 - RNA, 22 nt, Artificial Sequence
  SAMD9 targeting guide sequence portion
ucuccuugauaaccaacuauau

SEQ ID NO: 2013 - RNA, 22 nt, Artificial Sequence
  SAMD9 targeting guide sequence portion
ucucuccuugauaaccaacuau

SEQ ID NO: 2014 - RNA, 22 nt, Artificial Sequence
  SAMD9 targeting guide sequence portion
ugauaaccaacuauauuguaag

SEQ ID NO: 2015 - RNA, 22 nt, Artificial Sequence
  SAMD9 targeting guide sequence portion
ugauacuuacaauauaguuggu

SEQ ID NO: 2016 - RNA, 22 nt, Artificial Sequence
  SAMD9 targeting guide sequence portion
uuacaauauaguugguuaucaa

SEQ ID NO: 2017 - RNA, 22 nt, Artificial Sequence
  SAMD9 targeting guide sequence portion
uucuaucucuccuugauaacca

SEQ ID NO: 2018 - RNA, 22 nt, Artificial Sequence
  SAMD9 targeting guide sequence portion
uugauaaccaacuauauuguaa

SEQ ID NO: 2019 - RNA, 22 nt, Artificial Sequence
  SAMD9 targeting guide sequence portion
uugguuaucaaggagagauaga

SEQ ID NO: 2020 - RNA, 20 nt, Artificial Sequence
  SAMD9 targeting guide sequence portion
aaagaaucucaacaguaaag

SEQ ID NO: 2021 - RNA, 20 nt, Artificial Sequence
  SAMD9 targeting guide sequence portion
aacaguaaagugaagauaga

SEQ ID NO: 2022 - RNA, 20 nt, Artificial Sequence
  SAMD9 targeting guide sequence portion
aagaaucucaacaguaaagu

SEQ ID NO: 2023 - RNA, 20 nt, Artificial Sequence
  SAMD9 targeting guide sequence portion
aagugcauucaaagaaucuc

SEQ ID NO: 2024 - RNA, 20 nt, Artificial Sequence
  SAMD9 targeting guide sequence portion
aaucucaacaguaaagugaa

SEQ ID NO: 2025 - RNA, 20 nt, Artificial Sequence
  SAMD9 targeting guide sequence portion
acaguaaagugaagauagag

SEQ ID NO: 2026 - RNA, 20 nt, Artificial Sequence
  SAMD9 targeting guide sequence portion
acucucuaucuucacuuuac

SEQ ID NO: 2027 - RNA, 20 nt, Artificial Sequence
  SAMD9 targeting guide sequence portion
acuguugagauucuuugaau

SEQ ID NO: 2028 - RNA, 20 nt, Artificial Sequence
  SAMD9 targeting guide sequence portion
acuucauacucucuaucuuc

SEQ ID NO: 2029 - RNA, 20 nt, Artificial Sequence
  SAMD9 targeting guide sequence portion
acuuuacuguugagauucuu

SEQ ID NO: 2030 - RNA, 20 nt, Artificial Sequence
  SAMD9 targeting guide sequence portion
agaaucucaacaguaaagug

SEQ ID NO: 2031 - RNA, 20 nt, Artificial Sequence
  SAMD9 targeting guide sequence portion
aguaaagugaagauagagag

SEQ ID NO: 2032 - RNA, 20 nt, Artificial Sequence
  SAMD9 targeting guide sequence portion
agugcauucaaagaaucuca

SEQ ID NO: 2033 - RNA, 20 nt, Artificial Sequence
  SAMD9 targeting guide sequence portion
auacucucuaucuucacuuu

SEQ ID NO: 2034 - RNA, 20 nt, Artificial Sequence
  SAMD9 targeting guide sequence portion
aucucaacaguaaagugaag

SEQ ID NO: 2035 - RNA, 20 nt, Artificial Sequence
  SAMD9 targeting guide sequence portion
aucuucacuuuacuguugag

SEQ ID NO: 2036 - RNA, 20 nt, Artificial Sequence
  SAMD9 targeting guide sequence portion
auucaaagaaucucaacagu

SEQ ID NO: 2037 - RNA, 20 nt, Artificial Sequence
  SAMD9 targeting guide sequence portion
caaagaaucucaacaguaaa

SEQ ID NO: 2038 - RNA, 20 nt, Artificial Sequence
  SAMD9 targeting guide sequence portion
caacaguaaagugaagauag

SEQ ID NO: 2039 - RNA, 20 nt, Artificial Sequence
  SAMD9 targeting guide sequence portion
cacuuuacuguugagauucu

SEQ ID NO: 2040 - RNA, 20 nt, Artificial Sequence
  SAMD9 targeting guide sequence portion
caguaaagugaagauagaga

SEQ ID NO: 2041 - RNA, 20 nt, Artificial Sequence
  SAMD9 targeting guide sequence portion
cauacucucuaucuucacuu

SEQ ID NO: 2042 - RNA, 20 nt, Artificial Sequence
  SAMD9 targeting guide sequence portion
cauucaaagaaucucaacag

SEQ ID NO: 2043 - RNA, 20 nt, Artificial Sequence
  SAMD9 targeting guide sequence portion
cuaucuucacuuuacuguug

SEQ ID NO: 2044 - RNA, 20 nt, Artificial Sequence
  SAMD9 targeting guide sequence portion
cucaacaguaaagugaagau

SEQ ID NO: 2045 - RNA, 20 nt, Artificial Sequence
  SAMD9 targeting guide sequence portion
cucuaucuucacuuuacugu

SEQ ID NO: 2046 - RNA, 20 nt, Artificial Sequence
  SAMD9 targeting guide sequence portion
cucucuaucuucacuuuacu

SEQ ID NO: 2047 - RNA, 20 nt, Artificial Sequence
  SAMD9 targeting guide sequence portion
cuucacuuuacuguugagau

SEQ ID NO: 2048 - RNA, 20 nt, Artificial Sequence
  SAMD9 targeting guide sequence portion
cuucauacucucuaucuuca

SEQ ID NO: 2049 - RNA, 20 nt, Artificial Sequence
  SAMD9 targeting guide sequence portion
cuuuacuguugagauucuuu

SEQ ID NO: 2050 - RNA, 20 nt, Artificial Sequence
  SAMD9 targeting guide sequence portion
gaaucucaacaguaaaguga

SEQ ID NO: 2051 - RNA, 20 nt, Artificial Sequence
  SAMD9 targeting guide sequence portion
gcauucaaagaaucucaaca

SEQ ID NO: 2052 - RNA, 20 nt, Artificial Sequence
  SAMD9 targeting guide sequence portion
guaaagugaagauagagagu

SEQ ID NO: 2053 - RNA, 20 nt, Artificial Sequence
  SAMD9 targeting guide sequence portion
gugcauucaaagaaucucaa

SEQ ID NO: 2054 - RNA, 20 nt, Artificial Sequence
  SAMD9 targeting guide sequence portion
uaaagugaagauagagagua

SEQ ID NO: 2055 - RNA, 20 nt, Artificial Sequence
  SAMD9 targeting guide sequence portion
uacucucuaucuucacuuua

SEQ ID NO: 2056 - RNA, 20 nt, Artificial Sequence
  SAMD9 targeting guide sequence portion
uacuguugagauucuuugaa

SEQ ID NO: 2057 - RNA, 20 nt, Artificial Sequence
  SAMD9 targeting guide sequence portion
uaucuucacuuuacuguuga

SEQ ID NO: 2058 - RNA, 20 nt, Artificial Sequence
  SAMD9 targeting guide sequence portion
ucaaagaaucucaacaguaa

SEQ ID NO: 2059 - RNA, 20 nt, Artificial Sequence
  SAMD9 targeting guide sequence portion
ucaacaguaaagugaagaua

SEQ ID NO: 2060 - RNA, 20 nt, Artificial Sequence
  SAMD9 targeting guide sequence portion
ucacuuuacuguugagauuc

SEQ ID NO: 2061 - RNA, 20 nt, Artificial Sequence
  SAMD9 targeting guide sequence portion
ucauacucucuaucuucacu

SEQ ID NO: 2062 - RNA, 20 nt, Artificial Sequence
  SAMD9 targeting guide sequence portion
ucuaucuucacuuuacuguu

SEQ ID NO: 2063 - RNA, 20 nt, Artificial Sequence
  SAMD9 targeting guide sequence portion
ucucaacaguaaagugaaga

SEQ ID NO: 2064 - RNA, 20 nt, Artificial Sequence
  SAMD9 targeting guide sequence portion
ucucuaucuucacuuuacug

SEQ ID NO: 2065 - RNA, 20 nt, Artificial Sequence
  SAMD9 targeting guide sequence portion
ucuucacuuuacuguugaga

SEQ ID NO: 2066 - RNA, 20 nt, Artificial Sequence
  SAMD9 targeting guide sequence portion
ugcauucaaagaaucucaac

SEQ ID NO: 2067 - RNA, 20 nt, Artificial Sequence
  SAMD9 targeting guide sequence portion
uuacuguugagauucuuuga

SEQ ID NO: 2068 - RNA, 20 nt, Artificial Sequence
  SAMD9 targeting guide sequence portion
uucaaagaaucucaacagua

SEQ ID NO: 2069 - RNA, 20 nt, Artificial Sequence
  SAMD9 targeting guide sequence portion
uucacuuuacuguugagauu

SEQ ID NO: 2070 - RNA, 20 nt, Artificial Sequence
  SAMD9 targeting guide sequence portion
uucauacucucuaucuucac

SEQ ID NO: 2071 - RNA, 20 nt, Artificial Sequence
  SAMD9 targeting guide sequence portion
uuuacuguugagauucuuug

SEQ ID NO: 2072 - RNA, 21 nt, Artificial Sequence
  SAMD9 targeting guide sequence portion
aaagaaucucaacaguaaagu

SEQ ID NO: 2073 - RNA, 21 nt, Artificial Sequence
  SAMD9 targeting guide sequence portion
aacaguaaagugaagauagag

SEQ ID NO: 2074 - RNA, 21 nt, Artificial Sequence
  SAMD9 targeting guide sequence portion
aagaaucucaacaguaaagug

SEQ ID NO: 2075 - RNA, 21 nt, Artificial Sequence
  SAMD9 targeting guide sequence portion
aagugcauucaaagaaucuca

SEQ ID NO: 2076 - RNA, 21 nt, Artificial Sequence
  SAMD9 targeting guide sequence portion
aaucucaacaguaaagugaag

SEQ ID NO: 2077 - RNA, 21 nt, Artificial Sequence
  SAMD9 targeting guide sequence portion
acaguaaagugaagauagaga

SEQ ID NO: 2078 - RNA, 21 nt, Artificial Sequence
  SAMD9 targeting guide sequence portion
acucucuaucuucacuuuacu

SEQ ID NO: 2079 - RNA, 21 nt, Artificial Sequence
  SAMD9 targeting guide sequence portion
acuguugagauucuuugaaug

SEQ ID NO: 2080 - RNA, 21 nt, Artificial Sequence
  SAMD9 targeting guide sequence portion
acuucauacucucuaucuuca

SEQ ID NO: 2081 - RNA, 21 nt, Artificial Sequence
  SAMD9 targeting guide sequence portion
acuuuacuguugagauucuuu

SEQ ID NO: 2082 - RNA, 21 nt, Artificial Sequence
  SAMD9 targeting guide sequence portion
agaaucucaacaguaaaguga

SEQ ID NO: 2083 - RNA, 21 nt, Artificial Sequence
  SAMD9 targeting guide sequence portion
aguaaagugaagauagagagu

SEQ ID NO: 2084 - RNA, 21 nt, Artificial Sequence
  SAMD9 targeting guide sequence portion
agugcauucaaagaaucucaa

SEQ ID NO: 2085 - RNA, 21 nt, Artificial Sequence
  SAMD9 targeting guide sequence portion
auacucucuaucuucacuuua

SEQ ID NO: 2086 - RNA, 21 nt, Artificial Sequence
  SAMD9 targeting guide sequence portion
aucucaacaguaaagugaaga

SEQ ID NO: 2087 - RNA, 21 nt, Artificial Sequence
  SAMD9 targeting guide sequence portion
aucuucacuuuacuguugaga

SEQ ID NO: 2088 - RNA, 21 nt, Artificial Sequence
  SAMD9 targeting guide sequence portion
auucaaagaaucucaacagua

SEQ ID NO: 2089 - RNA, 21 nt, Artificial Sequence
  SAMD9 targeting guide sequence portion
caaagaaucucaacaguaaag

SEQ ID NO: 2090 - RNA, 21 nt, Artificial Sequence
  SAMD9 targeting guide sequence portion
caacaguaaagugaagauaga

SEQ ID NO: 2091 - RNA, 21 nt, Artificial Sequence
  SAMD9 targeting guide sequence portion
caagugcauucaaagaaucuc

SEQ ID NO: 2092 - RNA, 21 nt, Artificial Sequence
  SAMD9 targeting guide sequence portion
cacuucauacucucuaucuuc

SEQ ID NO: 2093 - RNA, 21 nt, Artificial Sequence
  SAMD9 targeting guide sequence portion
cacuuuacuguugagauucuu

SEQ ID NO: 2094 - RNA, 21 nt, Artificial Sequence
  SAMD9 targeting guide sequence portion
caguaaagugaagauagagag

SEQ ID NO: 2095 - RNA, 21 nt, Artificial Sequence
  SAMD9 targeting guide sequence portion
cauacucucuaucuucacuuu

SEQ ID NO: 2096 - RNA, 21 nt, Artificial Sequence
  SAMD9 targeting guide sequence portion
cauucaaagaaucucaacagu

SEQ ID NO: 2097 - RNA, 21 nt, Artificial Sequence
  SAMD9 targeting guide sequence portion
cuaucuucacuuuacuguuga

SEQ ID NO: 2098 - RNA, 21 nt, Artificial Sequence
  SAMD9 targeting guide sequence portion
cucaacaguaaagugaagaua

SEQ ID NO: 2099 - RNA, 21 nt, Artificial Sequence
  SAMD9 targeting guide sequence portion
cucuaucuucacuuuacuguu

SEQ ID NO: 2100 - RNA, 21 nt, Artificial Sequence
  SAMD9 targeting guide sequence portion
cucucuaucuucacuuuacug

SEQ ID NO: 2101 - RNA, 21 nt, Artificial Sequence
  SAMD9 targeting guide sequence portion
cuucacuuuacuguugagauu

SEQ ID NO: 2102 - RNA, 21 nt, Artificial Sequence
  SAMD9 targeting guide sequence portion
cuucauacucucuaucuucac

SEQ ID NO: 2103 - RNA, 21 nt, Artificial Sequence
  SAMD9 targeting guide sequence portion
cuuuacuguugagauucuuug

SEQ ID NO: 2104 - RNA, 21 nt, Artificial Sequence
  SAMD9 targeting guide sequence portion
gaaucucaacaguaaagugaa

SEQ ID NO: 2105 - RNA, 21 nt, Artificial Sequence
  SAMD9 targeting guide sequence portion
gcauucaaagaaucucaacag

SEQ ID NO: 2106 - RNA, 21 nt, Artificial Sequence
  SAMD9 targeting guide sequence portion
guaaagugaagauagagagua

SEQ ID NO: 2107 - RNA, 21 nt, Artificial Sequence
  SAMD9 targeting guide sequence portion
gugcauucaaagaaucucaac

SEQ ID NO: 2108 - RNA, 21 nt, Artificial Sequence
  SAMD9 targeting guide sequence portion
uaaagugaagauagagaguau

SEQ ID NO: 2109 - RNA, 21 nt, Artificial Sequence
  SAMD9 targeting guide sequence portion
uacucucuaucuucacuuuac

SEQ ID NO: 2110 - RNA, 21 nt, Artificial Sequence
  SAMD9 targeting guide sequence portion
uacuguugagauucuuugaau

SEQ ID NO: 2111 - RNA, 21 nt, Artificial Sequence
  SAMD9 targeting guide sequence portion
uaucuucacuuuacuguugag

SEQ ID NO: 2112 - RNA, 21 nt, Artificial Sequence
  SAMD9 targeting guide sequence portion
ucaaagaaucucaacaguaaa

SEQ ID NO: 2113 - RNA, 21 nt, Artificial Sequence
  SAMD9 targeting guide sequence portion
ucaacaguaaagugaagauag

SEQ ID NO: 2114 - RNA, 21 nt, Artificial Sequence
  SAMD9 targeting guide sequence portion
ucacuuuacuguugagauucu

SEQ ID NO: 2115 - RNA, 21 nt, Artificial Sequence
  SAMD9 targeting guide sequence portion
ucauacucucuaucuucacuu

SEQ ID NO: 2116 - RNA, 21 nt, Artificial Sequence
  SAMD9 targeting guide sequence portion
ucuaucuucacuuuacuguug

SEQ ID NO: 2117 - RNA, 21 nt, Artificial Sequence
  SAMD9 targeting guide sequence portion
ucucaacaguaaagugaagau

SEQ ID NO: 2118 - RNA, 21 nt, Artificial Sequence
  SAMD9 targeting guide sequence portion
ucucuaucuucacuuuacugu

SEQ ID NO: 2119 - RNA, 21 nt, Artificial Sequence
  SAMD9 targeting guide sequence portion
ucuucacuuuacuguugagau

SEQ ID NO: 2120 - RNA, 21 nt, Artificial Sequence
  SAMD9 targeting guide sequence portion
ugcauucaaagaaucucaaca

SEQ ID NO: 2121 - RNA, 21 nt, Artificial Sequence
  SAMD9 targeting guide sequence portion
uuacuguugagauucuuugaa

SEQ ID NO: 2122 - RNA, 21 nt, Artificial Sequence
  SAMD9 targeting guide sequence portion
uucaaagaaucucaacaguaa

SEQ ID NO: 2123 - RNA, 21 nt, Artificial Sequence
  SAMD9 targeting guide sequence portion
uucacuuuacuguugagauuc

SEQ ID NO: 2124 - RNA, 21 nt, Artificial Sequence
  SAMD9 targeting guide sequence portion
uucauacucucuaucuucacu

SEQ ID NO: 2125 - RNA, 21 nt, Artificial Sequence
  SAMD9 targeting guide sequence portion
uuuacuguugagauucuuuga

SEQ ID NO: 2126 - RNA, 22 nt, Artificial Sequence
  SAMD9 targeting guide sequence portion
aaagaaucucaacaguaaagug

SEQ ID NO: 2127 - RNA, 22 nt, Artificial Sequence
  SAMD9 targeting guide sequence portion
aacaguaaagugaagauagaga

SEQ ID NO: 2128 - RNA, 22 nt, Artificial Sequence
  SAMD9 targeting guide sequence portion
aagaaucucaacaguaaaguga

SEQ ID NO: 2129 - RNA, 22 nt, Artificial Sequence
  SAMD9 targeting guide sequence portion
aagugcauucaaagaaucucaa

SEQ ID NO: 2130 - RNA, 22 nt, Artificial Sequence
  SAMD9 targeting guide sequence portion
aaucucaacaguaaagugaaga

SEQ ID NO: 2131 - RNA, 22 nt, Artificial Sequence
  SAMD9 targeting guide sequence portion
acaguaaagugaagauagagag

SEQ ID NO: 2132 - RNA, 22 nt, Artificial Sequence
  SAMD9 targeting guide sequence portion
acucucuaucuucacuuuacug

SEQ ID NO: 2133 - RNA, 22 nt, Artificial Sequence
  SAMD9 targeting guide sequence portion
acuguugagauucuuugaaugc

SEQ ID NO: 2134 - RNA, 22 nt, Artificial Sequence
  SAMD9 targeting guide sequence portion
acuucauacucucuaucuucac

SEQ ID NO: 2135 - RNA, 22 nt, Artificial Sequence
  SAMD9 targeting guide sequence portion
acuuuacuguugagauucuuug

SEQ ID NO: 2136 - RNA, 22 nt, Artificial Sequence
  SAMD9 targeting guide sequence portion
agaaucucaacaguaaagugaa

SEQ ID NO: 2137 - RNA, 22 nt, Artificial Sequence
  SAMD9 targeting guide sequence portion
aguaaagugaagauagagagua

SEQ ID NO: 2138 - RNA, 22 nt, Artificial Sequence
  SAMD9 targeting guide sequence portion
agugcauucaaagaaucucaac

SEQ ID NO: 2139 - RNA, 22 nt, Artificial Sequence
  SAMD9 targeting guide sequence portion
auacucucuaucuucacuuuac

SEQ ID NO: 2140 - RNA, 22 nt, Artificial Sequence
  SAMD9 targeting guide sequence portion
aucucaacaguaaagugaagau

SEQ ID NO: 2141 - RNA, 22 nt, Artificial Sequence
  SAMD9 targeting guide sequence portion
aucuucacuuuacuguugagau

SEQ ID NO: 2142 - RNA, 22 nt, Artificial Sequence
  SAMD9 targeting guide sequence portion
auucaaagaaucucaacaguaa

SEQ ID NO: 2143 - RNA, 22 nt, Artificial Sequence
  SAMD9 targeting guide sequence portion
caaagaaucucaacaguaaagu

SEQ ID NO: 2144 - RNA, 22 nt, Artificial Sequence
  SAMD9 targeting guide sequence portion
caacaguaaagugaagauagag

SEQ ID NO: 2145 - RNA, 22 nt, Artificial Sequence
  SAMD9 targeting guide sequence portion
caagugcauucaaagaaucuca

SEQ ID NO: 2146 - RNA, 22 nt, Artificial Sequence
  SAMD9 targeting guide sequence portion
cacuucauacucucuaucuuca

SEQ ID NO: 2147 - RNA, 22 nt, Artificial Sequence
  SAMD9 targeting guide sequence portion
cacuuuacuguugagauucuuu

SEQ ID NO: 2148 - RNA, 22 nt, Artificial Sequence
  SAMD9 targeting guide sequence portion
caguaaagugaagauagagagu

SEQ ID NO: 2149 - RNA, 22 nt, Artificial Sequence
  SAMD9 targeting guide sequence portion
cauacucucuaucuucacuuua

SEQ ID NO: 2150 - RNA, 22 nt, Artificial Sequence
  SAMD9 targeting guide sequence portion
cauucaaagaaucucaacagua

SEQ ID NO: 2151 - RNA, 22 nt, Artificial Sequence
  SAMD9 targeting guide sequence portion
cuaucuucacuuuacuguugag

SEQ ID NO: 2152 - RNA, 22 nt, Artificial Sequence
  SAMD9 targeting guide sequence portion
cucaacaguaaagugaagauag

SEQ ID NO: 2153 - RNA, 22 nt, Artificial Sequence
  SAMD9 targeting guide sequence portion
cucuaucuucacuuuacuguug

SEQ ID NO: 2154 - RNA, 22 nt, Artificial Sequence
  SAMD9 targeting guide sequence portion
cucucuaucuucacuuuacugu

SEQ ID NO: 2155 - RNA, 22 nt, Artificial Sequence
  SAMD9 targeting guide sequence portion
cuucacuuuacuguugagauuc

SEQ ID NO: 2156 - RNA, 22 nt, Artificial Sequence
  SAMD9 targeting guide sequence portion
cuucauacucucuaucuucacu

SEQ ID NO: 2157 - RNA, 22 nt, Artificial Sequence
  SAMD9 targeting guide sequence portion
cuuuacuguugagauucuuuga

SEQ ID NO: 2158 - RNA, 22 nt, Artificial Sequence
  SAMD9 targeting guide sequence portion
gaaucucaacaguaaagugaag

SEQ ID NO: 2159 - RNA, 22 nt, Artificial Sequence
  SAMD9 targeting guide sequence portion
gcauucaaagaaucucaacagu

SEQ ID NO: 2160 - RNA, 22 nt, Artificial Sequence
  SAMD9 targeting guide sequence portion
guaaagugaagauagagaguau

SEQ ID NO: 2161 - RNA, 22 nt, Artificial Sequence
  SAMD9 targeting guide sequence portion
gugcauucaaagaaucucaaca

SEQ ID NO: 2162 - RNA, 22 nt, Artificial Sequence
  SAMD9 targeting guide sequence portion
uaaagugaagauagagaguaug

SEQ ID NO: 2163 - RNA, 22 nt, Artificial Sequence
  SAMD9 targeting guide sequence portion
uacucucuaucuucacuuuacu

SEQ ID NO: 2164 - RNA, 22 nt, Artificial Sequence
  SAMD9 targeting guide sequence portion
uacuguugagauucuuugaaug

SEQ ID NO: 2165 - RNA, 22 nt, Artificial Sequence
  SAMD9 targeting guide sequence portion
uaucuucacuuuacuguugaga

SEQ ID NO: 2166 - RNA, 22 nt, Artificial Sequence
  SAMD9 targeting guide sequence portion
ucaaagaaucucaacaguaaag

SEQ ID NO: 2167 - RNA, 22 nt, Artificial Sequence
  SAMD9 targeting guide sequence portion
ucaacaguaaagugaagauaga

SEQ ID NO: 2168 - RNA, 22 nt, Artificial Sequence
  SAMD9 targeting guide sequence portion
ucaagugcauucaaagaaucuc

SEQ ID NO: 2169 - RNA, 22 nt, Artificial Sequence
  SAMD9 targeting guide sequence portion
ucacuucauacucucuaucuuc

SEQ ID NO: 2170 - RNA, 22 nt, Artificial Sequence
  SAMD9 targeting guide sequence portion
ucacuuuacuguugagauucuu

SEQ ID NO: 2171 - RNA, 22 nt, Artificial Sequence
  SAMD9 targeting guide sequence portion
ucauacucucuaucuucacuuu

SEQ ID NO: 2172 - RNA, 22 nt, Artificial Sequence
  SAMD9 targeting guide sequence portion
ucuaucuucacuuuacuguuga

SEQ ID NO: 2173 - RNA, 22 nt, Artificial Sequence
  SAMD9 targeting guide sequence portion
ucucaacaguaaagugaagaua

SEQ ID NO: 2174 - RNA, 22 nt, Artificial Sequence
  SAMD9 targeting guide sequence portion
ucucuaucuucacuuuacuguu

SEQ ID NO: 2175 - RNA, 22 nt, Artificial Sequence
  SAMD9 targeting guide sequence portion
ucuucacuuuacuguugagauu

SEQ ID NO: 2176 - RNA, 22 nt, Artificial Sequence
  SAMD9 targeting guide sequence portion
ugcauucaaagaaucucaacag

SEQ ID NO: 2177 - RNA, 22 nt, Artificial Sequence
  SAMD9 targeting guide sequence portion
uuacuguugagauucuuugaau

SEQ ID NO: 2178 - RNA, 22 nt, Artificial Sequence
  SAMD9 targeting guide sequence portion
uucaaagaaucucaacaguaaa

SEQ ID NO: 2179 - RNA, 22 nt, Artificial Sequence
  SAMD9 targeting guide sequence portion
uucacuuuacuguugagauucu

SEQ ID NO: 2180 - RNA, 22 nt, Artificial Sequence
  SAMD9 targeting guide sequence portion
uucauacucucuaucuucacuu

SEQ ID NO: 2181 - RNA, 22 nt, Artificial Sequence
  SAMD9 targeting guide sequence portion
uuuacuguugagauucuuugaa

SEQ ID NO: 2182 - RNA, 20 nt, Artificial Sequence
  SAMD9 targeting guide sequence portion
aaaaguaaaauaagauggug

SEQ ID NO: 2183 - RNA, 20 nt, Artificial Sequence
  SAMD9 targeting guide sequence portion
aaaauaagaugguggauaca

SEQ ID NO: 2184 - RNA, 20 nt, Artificial Sequence
  SAMD9 targeting guide sequence portion
aaaguaaaauaagauggugg

SEQ ID NO: 2185 - RNA, 20 nt, Artificial Sequence
  SAMD9 targeting guide sequence portion
aaauaagaugguggauacag

SEQ ID NO: 2186 - RNA, 20 nt, Artificial Sequence
  SAMD9 targeting guide sequence portion
aagaugguggauacaggaaa

SEQ ID NO: 2187 - RNA, 20 nt, Artificial Sequence
  SAMD9 targeting guide sequence portion
aaguaaaauaagauggugga

SEQ ID NO: 2188 - RNA, 20 nt, Artificial Sequence
  SAMD9 targeting guide sequence portion
aauaagaugguggauacagg

SEQ ID NO: 2189 - RNA, 20 nt, Artificial Sequence
  SAMD9 targeting guide sequence portion
acaggaaaacggaggaaacg

SEQ ID NO: 2190 - RNA, 20 nt, Artificial Sequence
  SAMD9 targeting guide sequence portion
agaugguggauacaggaaaa

SEQ ID NO: 2191 - RNA, 20 nt, Artificial Sequence
  SAMD9 targeting guide sequence portion
aguaaaauaagaugguggau

SEQ ID NO: 2192 - RNA, 20 nt, Artificial Sequence
  SAMD9 targeting guide sequence portion
auaagaugguggauacagga

SEQ ID NO: 2193 - RNA, 20 nt, Artificial Sequence
  SAMD9 targeting guide sequence portion
auacaggaaaacggaggaaa

SEQ ID NO: 2194 - RNA, 20 nt, Artificial Sequence
  SAMD9 targeting guide sequence portion
augguggauacaggaaaacg

SEQ ID NO: 2195 - RNA, 20 nt, Artificial Sequence
  SAMD9 targeting guide sequence portion
auguucccguuuccuccguu

SEQ ID NO: 2196 - RNA, 20 nt, Artificial Sequence
  SAMD9 targeting guide sequence portion
caaaaguaaaauaagauggu

SEQ ID NO: 2197 - RNA, 20 nt, Artificial Sequence
  SAMD9 targeting guide sequence portion
caggaaaacggaggaaacgg

SEQ ID NO: 2198 - RNA, 20 nt, Artificial Sequence
  SAMD9 targeting guide sequence portion
cccguuuccuccguuuuccu

SEQ ID NO: 2199 - RNA, 20 nt, Artificial Sequence
  SAMD9 targeting guide sequence portion
ccguuuccuccguuuuccug

SEQ ID NO: 2200 - RNA, 20 nt, Artificial Sequence
  SAMD9 targeting guide sequence portion
ccguuuuccuguauccacca

SEQ ID NO: 2201 - RNA, 20 nt, Artificial Sequence
  SAMD9 targeting guide sequence portion
ccuccguuuuccuguaucca

SEQ ID NO: 2202 - RNA, 20 nt, Artificial Sequence
  SAMD9 targeting guide sequence portion
ccuguauccaccaucuuauu

SEQ ID NO: 2203 - RNA, 20 nt, Artificial Sequence
  SAMD9 targeting guide sequence portion
cguuuccuccguuuuccugu

SEQ ID NO: 2204 - RNA, 20 nt, Artificial Sequence
  SAMD9 targeting guide sequence portion
cguuuuccuguauccaccau

SEQ ID NO: 2205 - RNA, 20 nt, Artificial Sequence
  SAMD9 targeting guide sequence portion
cuccguuuuccuguauccac

SEQ ID NO: 2206 - RNA, 20 nt, Artificial Sequence
  SAMD9 targeting guide sequence portion
cuguauccaccaucuuauuu

SEQ ID NO: 2207 - RNA, 20 nt, Artificial Sequence
  SAMD9 targeting guide sequence portion
gauacaggaaaacggaggaa

SEQ ID NO: 2208 - RNA, 20 nt, Artificial Sequence
  SAMD9 targeting guide sequence portion
gaugguggauacaggaaaac

SEQ ID NO: 2209 - RNA, 20 nt, Artificial Sequence
  SAMD9 targeting guide sequence portion
ggauacaggaaaacggagga

SEQ ID NO: 2210 - RNA, 20 nt, Artificial Sequence
  SAMD9 targeting guide sequence portion
gguggauacaggaaaacgga

SEQ ID NO: 2211 - RNA, 20 nt, Artificial Sequence
  SAMD9 targeting guide sequence portion
guaaaauaagaugguggaua

SEQ ID NO: 2212 - RNA, 20 nt, Artificial Sequence
  SAMD9 targeting guide sequence portion
guauccaccaucuuauuuua

SEQ ID NO: 2213 - RNA, 20 nt, Artificial Sequence
  SAMD9 targeting guide sequence portion
guggauacaggaaaacggag

SEQ ID NO: 2214 - RNA, 20 nt, Artificial Sequence
  SAMD9 targeting guide sequence portion
guucccguuuccuccguuuu

SEQ ID NO: 2215 - RNA, 20 nt, Artificial Sequence
  SAMD9 targeting guide sequence portion
guuuccuccguuuuccugua

SEQ ID NO: 2216 - RNA, 20 nt, Artificial Sequence
  SAMD9 targeting guide sequence portion
guuuuccuguauccaccauc

SEQ ID NO: 2217 - RNA, 20 nt, Artificial Sequence
  SAMD9 targeting guide sequence portion
uaaaauaagaugguggauac

SEQ ID NO: 2218 - RNA, 20 nt, Artificial Sequence
  SAMD9 targeting guide sequence portion
uaagaugguggauacaggaa

SEQ ID NO: 2219 - RNA, 20 nt, Artificial Sequence
  SAMD9 targeting guide sequence portion
uacaggaaaacggaggaaac

SEQ ID NO: 2220 - RNA, 20 nt, Artificial Sequence
  SAMD9 targeting guide sequence portion
ucccguuuccuccguuuucc

SEQ ID NO: 2221 - RNA, 20 nt, Artificial Sequence
  SAMD9 targeting guide sequence portion
uccguuuuccuguauccacc

SEQ ID NO: 2222 - RNA, 20 nt, Artificial Sequence
  SAMD9 targeting guide sequence portion
uccuccguuuuccuguaucc

SEQ ID NO: 2223 - RNA, 20 nt, Artificial Sequence
  SAMD9 targeting guide sequence portion
uccuguauccaccaucuuau

SEQ ID NO: 2224 - RNA, 20 nt, Artificial Sequence
  SAMD9 targeting guide sequence portion
uggauacaggaaaacggagg

SEQ ID NO: 2225 - RNA, 20 nt, Artificial Sequence
  SAMD9 targeting guide sequence portion
ugguggauacaggaaaacgg

SEQ ID NO: 2226 - RNA, 20 nt, Artificial Sequence
  SAMD9 targeting guide sequence portion
uguauccaccaucuuauuuu

SEQ ID NO: 2227 - RNA, 20 nt, Artificial Sequence
  SAMD9 targeting guide sequence portion
uguucccguuuccuccguuu

SEQ ID NO: 2228 - RNA, 20 nt, Artificial Sequence
  SAMD9 targeting guide sequence portion
uucccguuuccuccguuuuc

SEQ ID NO: 2229 - RNA, 20 nt, Artificial Sequence
  SAMD9 targeting guide sequence portion
uuccuccguuuuccuguauc

SEQ ID NO: 2230 - RNA, 20 nt, Artificial Sequence
  SAMD9 targeting guide sequence portion
uuccuguauccaccaucuua

SEQ ID NO: 2231 - RNA, 20 nt, Artificial Sequence
  SAMD9 targeting guide sequence portion
uuuccuccguuuuccuguau

SEQ ID NO: 2232 - RNA, 20 nt, Artificial Sequence
  SAMD9 targeting guide sequence portion
uuuccuguauccaccaucuu

SEQ ID NO: 2233 - RNA, 20 nt, Artificial Sequence
  SAMD9 targeting guide sequence portion
uuuuccuguauccaccaucu

SEQ ID NO: 2234 - RNA, 21 nt, Artificial Sequence
  SAMD9 targeting guide sequence portion
aaaaguaaaauaagauggugg

SEQ ID NO: 2235 - RNA, 21 nt, Artificial Sequence
  SAMD9 targeting guide sequence portion
aaaauaagaugguggauacag

SEQ ID NO: 2236 - RNA, 21 nt, Artificial Sequence
  SAMD9 targeting guide sequence portion
aaaguaaaauaagauggugga

SEQ ID NO: 2237 - RNA, 21 nt, Artificial Sequence
  SAMD9 targeting guide sequence portion
aaauaagaugguggauacagg

SEQ ID NO: 2238 - RNA, 21 nt, Artificial Sequence
  SAMD9 targeting guide sequence portion
aagaugguggauacaggaaaa

SEQ ID NO: 2239 - RNA, 21 nt, Artificial Sequence
  SAMD9 targeting guide sequence portion
aaguaaaauaagaugguggau

SEQ ID NO: 2240 - RNA, 21 nt, Artificial Sequence
  SAMD9 targeting guide sequence portion
aauaagaugguggauacagga

SEQ ID NO: 2241 - RNA, 21 nt, Artificial Sequence
  SAMD9 targeting guide sequence portion
aauguucccguuuccuccguu

SEQ ID NO: 2242 - RNA, 21 nt, Artificial Sequence
  SAMD9 targeting guide sequence portion
acaaaaguaaaauaagauggu

SEQ ID NO: 2243 - RNA, 21 nt, Artificial Sequence
  SAMD9 targeting guide sequence portion
acaggaaaacggaggaaacgg

SEQ ID NO: 2244 - RNA, 21 nt, Artificial Sequence
  SAMD9 targeting guide sequence portion
agaugguggauacaggaaaac

SEQ ID NO: 2245 - RNA, 21 nt, Artificial Sequence
  SAMD9 targeting guide sequence portion
aguaaaauaagaugguggaua

SEQ ID NO: 2246 - RNA, 21 nt, Artificial Sequence
  SAMD9 targeting guide sequence portion
auaagaugguggauacaggaa

SEQ ID NO: 2247 - RNA, 21 nt, Artificial Sequence
  SAMD9 targeting guide sequence portion
auacaggaaaacggaggaaac

SEQ ID NO: 2248 - RNA, 21 nt, Artificial Sequence
  SAMD9 targeting guide sequence portion
augguggauacaggaaaacgg

SEQ ID NO: 2249 - RNA, 21 nt, Artificial Sequence
  SAMD9 targeting guide sequence portion
auguucccguuuccuccguuu

SEQ ID NO: 2250 - RNA, 21 nt, Artificial Sequence
  SAMD9 targeting guide sequence portion
caaaaguaaaauaagauggug

SEQ ID NO: 2251 - RNA, 21 nt, Artificial Sequence
  SAMD9 targeting guide sequence portion
caggaaaacggaggaaacggg

SEQ ID NO: 2252 - RNA, 21 nt, Artificial Sequence
  SAMD9 targeting guide sequence portion
cccguuuccuccguuuuccug

SEQ ID NO: 2253 - RNA, 21 nt, Artificial Sequence
  SAMD9 targeting guide sequence portion
ccguuuccuccguuuuccugu

SEQ ID NO: 2254 - RNA, 21 nt, Artificial Sequence
  SAMD9 targeting guide sequence portion
ccguuuuccuguauccaccau

SEQ ID NO: 2255 - RNA, 21 nt, Artificial Sequence
  SAMD9 targeting guide sequence portion
ccuccguuuuccuguauccac

SEQ ID NO: 2256 - RNA, 21 nt, Artificial Sequence
  SAMD9 targeting guide sequence portion
ccuguauccaccaucuuauuu

SEQ ID NO: 2257 - RNA, 21 nt, Artificial Sequence
  SAMD9 targeting guide sequence portion
cguuuccuccguuuuccugua

SEQ ID NO: 2258 - RNA, 21 nt, Artificial Sequence
  SAMD9 targeting guide sequence portion
cguuuuccuguauccaccauc

SEQ ID NO: 2259 - RNA, 21 nt, Artificial Sequence
  SAMD9 targeting guide sequence portion
cuccguuuuccuguauccacc

SEQ ID NO: 2260 - RNA, 21 nt, Artificial Sequence
  SAMD9 targeting guide sequence portion
cuguauccaccaucuuauuuu

SEQ ID NO: 2261 - RNA, 21 nt, Artificial Sequence
  SAMD9 targeting guide sequence portion
gauacaggaaaacggaggaaa

SEQ ID NO: 2262 - RNA, 21 nt, Artificial Sequence
  SAMD9 targeting guide sequence portion
gaugguggauacaggaaaacg

SEQ ID NO: 2263 - RNA, 21 nt, Artificial Sequence
  SAMD9 targeting guide sequence portion
ggauacaggaaaacggaggaa

SEQ ID NO: 2264 - RNA, 21 nt, Artificial Sequence
  SAMD9 targeting guide sequence portion
gguggauacaggaaaacggag

SEQ ID NO: 2265 - RNA, 21 nt, Artificial Sequence
  SAMD9 targeting guide sequence portion
guaaaauaagaugguggauac

SEQ ID NO: 2266 - RNA, 21 nt, Artificial Sequence
  SAMD9 targeting guide sequence portion
guauccaccaucuuauuuuac

SEQ ID NO: 2267 - RNA, 21 nt, Artificial Sequence
  SAMD9 targeting guide sequence portion
guggauacaggaaaacggagg

SEQ ID NO: 2268 - RNA, 21 nt, Artificial Sequence
  SAMD9 targeting guide sequence portion
guucccguuuccuccguuuuc

SEQ ID NO: 2269 - RNA, 21 nt, Artificial Sequence
  SAMD9 targeting guide sequence portion
guuuccuccguuuuccuguau

SEQ ID NO: 2270 - RNA, 21 nt, Artificial Sequence
  SAMD9 targeting guide sequence portion
guuuuccuguauccaccaucu

SEQ ID NO: 2271 - RNA, 21 nt, Artificial Sequence
  SAMD9 targeting guide sequence portion
uaaaauaagaugguggauaca

SEQ ID NO: 2272 - RNA, 21 nt, Artificial Sequence
  SAMD9 targeting guide sequence portion
uaagaugguggauacaggaaa

SEQ ID NO: 2273 - RNA, 21 nt, Artificial Sequence
  SAMD9 targeting guide sequence portion
uacaggaaaacggaggaaacg

SEQ ID NO: 2274 - RNA, 21 nt, Artificial Sequence
  SAMD9 targeting guide sequence portion
ucccguuuccuccguuuuccu

SEQ ID NO: 2275 - RNA, 21 nt, Artificial Sequence
  SAMD9 targeting guide sequence portion
uccguuuuccuguauccacca

SEQ ID NO: 2276 - RNA, 21 nt, Artificial Sequence
  SAMD9 targeting guide sequence portion
uccuccguuuuccuguaucca

SEQ ID NO: 2277 - RNA, 21 nt, Artificial Sequence
  SAMD9 targeting guide sequence portion
uccuguauccaccaucuuauu

SEQ ID NO: 2278 - RNA, 21 nt, Artificial Sequence
  SAMD9 targeting guide sequence portion
uggauacaggaaaacggagga

SEQ ID NO: 2279 - RNA, 21 nt, Artificial Sequence
  SAMD9 targeting guide sequence portion
ugguggauacaggaaaacgga

SEQ ID NO: 2280 - RNA, 21 nt, Artificial Sequence
  SAMD9 targeting guide sequence portion
uguauccaccaucuuauuuua

SEQ ID NO: 2281 - RNA, 21 nt, Artificial Sequence
  SAMD9 targeting guide sequence portion
uguucccguuuccuccguuuu

SEQ ID NO: 2282 - RNA, 21 nt, Artificial Sequence
  SAMD9 targeting guide sequence portion
uucccguuuccuccguuuucc

SEQ ID NO: 2283 - RNA, 21 nt, Artificial Sequence
  SAMD9 targeting guide sequence portion
uuccuccguuuuccuguaucc

SEQ ID NO: 2284 - RNA, 21 nt, Artificial Sequence
  SAMD9 targeting guide sequence portion
uuccuguauccaccaucuuau

SEQ ID NO: 2285 - RNA, 21 nt, Artificial Sequence
  SAMD9 targeting guide sequence portion
uuuccuccguuuuccuguauc

SEQ ID NO: 2286 - RNA, 21 nt, Artificial Sequence
  SAMD9 targeting guide sequence portion
uuuccuguauccaccaucuua

SEQ ID NO: 2287 - RNA, 21 nt, Artificial Sequence
  SAMD9 targeting guide sequence portion
uuuuccuguauccaccaucuu

SEQ ID NO: 2288 - RNA, 22 nt, Artificial Sequence
  SAMD9 targeting guide sequence portion
aaaaguaaaauaagauggugga

SEQ ID NO: 2289 - RNA, 22 nt, Artificial Sequence
  SAMD9 targeting guide sequence portion
aaaauaagaugguggauacagg

SEQ ID NO: 2290 - RNA, 22 nt, Artificial Sequence
  SAMD9 targeting guide sequence portion
aaaguaaaauaagaugguggau

SEQ ID NO: 2291 - RNA, 22 nt, Artificial Sequence
  SAMD9 targeting guide sequence portion
aaauaagaugguggauacagga

SEQ ID NO: 2292 - RNA, 22 nt, Artificial Sequence
  SAMD9 targeting guide sequence portion
aaauguucccguuuccuccguu

SEQ ID NO: 2293 - RNA, 22 nt, Artificial Sequence
  SAMD9 targeting guide sequence portion
aagaugguggauacaggaaaac

SEQ ID NO: 2294 - RNA, 22 nt, Artificial Sequence
  SAMD9 targeting guide sequence portion
aaguaaaauaagaugguggaua

SEQ ID NO: 2295 - RNA, 22 nt, Artificial Sequence
  SAMD9 targeting guide sequence portion
aauaagaugguggauacaggaa

SEQ ID NO: 2296 - RNA, 22 nt, Artificial Sequence
  SAMD9 targeting guide sequence portion
aauguucccguuuccuccguuu

SEQ ID NO: 2297 - RNA, 22 nt, Artificial Sequence
  SAMD9 targeting guide sequence portion
acaaaaguaaaauaagauggug

SEQ ID NO: 2298 - RNA, 22 nt, Artificial Sequence
  SAMD9 targeting guide sequence portion
acaggaaaacggaggaaacggg

SEQ ID NO: 2299 - RNA, 22 nt, Artificial Sequence
  SAMD9 targeting guide sequence portion
agaugguggauacaggaaaacg

SEQ ID NO: 2300 - RNA, 22 nt, Artificial Sequence
  SAMD9 targeting guide sequence portion
aguaaaauaagaugguggauac

SEQ ID NO: 2301 - RNA, 22 nt, Artificial Sequence
  SAMD9 targeting guide sequence portion
auaagaugguggauacaggaaa

SEQ ID NO: 2302 - RNA, 22 nt, Artificial Sequence
  SAMD9 targeting guide sequence portion
auacaggaaaacggaggaaacg

SEQ ID NO: 2303 - RNA, 22 nt, Artificial Sequence
  SAMD9 targeting guide sequence portion
augguggauacaggaaaacgga

SEQ ID NO: 2304 - RNA, 22 nt, Artificial Sequence
  SAMD9 targeting guide sequence portion
auguucccguuuccuccguuuu

SEQ ID NO: 2305 - RNA, 22 nt, Artificial Sequence
  SAMD9 targeting guide sequence portion
caaaaguaaaauaagauggugg

SEQ ID NO: 2306 - RNA, 22 nt, Artificial Sequence
  SAMD9 targeting guide sequence portion
caggaaaacggaggaaacggga

SEQ ID NO: 2307 - RNA, 22 nt, Artificial Sequence
  SAMD9 targeting guide sequence portion
cccguuuccuccguuuuccugu

SEQ ID NO: 2308 - RNA, 22 nt, Artificial Sequence
  SAMD9 targeting guide sequence portion
ccguuuccuccguuuuccugua

SEQ ID NO: 2309 - RNA, 22 nt, Artificial Sequence
  SAMD9 targeting guide sequence portion
ccguuuuccuguauccaccauc

SEQ ID NO: 2310 - RNA, 22 nt, Artificial Sequence
  SAMD9 targeting guide sequence portion
ccuccguuuuccuguauccacc

SEQ ID NO: 2311 - RNA, 22 nt, Artificial Sequence
  SAMD9 targeting guide sequence portion
ccuguauccaccaucuuauuuu

SEQ ID NO: 2312 - RNA, 22 nt, Artificial Sequence
  SAMD9 targeting guide sequence portion
cguuuccuccguuuuccuguau

SEQ ID NO: 2313 - RNA, 22 nt, Artificial Sequence
  SAMD9 targeting guide sequence portion
cguuuuccuguauccaccaucu

SEQ ID NO: 2314 - RNA, 22 nt, Artificial Sequence
  SAMD9 targeting guide sequence portion
cuccguuuuccuguauccacca

SEQ ID NO: 2315 - RNA, 22 nt, Artificial Sequence
  SAMD9 targeting guide sequence portion
cuguauccaccaucuuauuuua

SEQ ID NO: 2316 - RNA, 22 nt, Artificial Sequence
  SAMD9 targeting guide sequence portion
gauacaggaaaacggaggaaac

SEQ ID NO: 2317 - RNA, 22 nt, Artificial Sequence
  SAMD9 targeting guide sequence portion
gaugguggauacaggaaaacgg

SEQ ID NO: 2318 - RNA, 22 nt, Artificial Sequence
  SAMD9 targeting guide sequence portion
ggauacaggaaaacggaggaaa

SEQ ID NO: 2319 - RNA, 22 nt, Artificial Sequence
  SAMD9 targeting guide sequence portion
gguggauacaggaaaacggagg

SEQ ID NO: 2320 - RNA, 22 nt, Artificial Sequence
  SAMD9 targeting guide sequence portion
guaaaauaagaugguggauaca

SEQ ID NO: 2321 - RNA, 22 nt, Artificial Sequence
  SAMD9 targeting guide sequence portion
guauccaccaucuuauuuuacu

SEQ ID NO: 2322 - RNA, 22 nt, Artificial Sequence
  SAMD9 targeting guide sequence portion
guggauacaggaaaacggagga

SEQ ID NO: 2323 - RNA, 22 nt, Artificial Sequence
  SAMD9 targeting guide sequence portion
guucccguuuccuccguuuucc

SEQ ID NO: 2324 - RNA, 22 nt, Artificial Sequence
  SAMD9 targeting guide sequence portion
guuuccuccguuuuccuguauc

SEQ ID NO: 2325 - RNA, 22 nt, Artificial Sequence
  SAMD9 targeting guide sequence portion
guuuuccuguauccaccaucuu

SEQ ID NO: 2326 - RNA, 22 nt, Artificial Sequence
  SAMD9 targeting guide sequence portion
uaaaauaagaugguggauacag

SEQ ID NO: 2327 - RNA, 22 nt, Artificial Sequence
  SAMD9 targeting guide sequence portion
uaagaugguggauacaggaaaa

SEQ ID NO: 2328 - RNA, 22 nt, Artificial Sequence
  SAMD9 targeting guide sequence portion
uacaaaaguaaaauaagauggu

SEQ ID NO: 2329 - RNA, 22 nt, Artificial Sequence
  SAMD9 targeting guide sequence portion
uacaggaaaacggaggaaacgg

SEQ ID NO: 2330 - RNA, 22 nt, Artificial Sequence
  SAMD9 targeting guide sequence portion
ucccguuuccuccguuuuccug

SEQ ID NO: 2331 - RNA, 22 nt, Artificial Sequence
  SAMD9 targeting guide sequence portion
uccguuuuccuguauccaccau

SEQ ID NO: 2332 - RNA, 22 nt, Artificial Sequence
  SAMD9 targeting guide sequence portion
uccuccguuuuccuguauccac

SEQ ID NO: 2333 - RNA, 22 nt, Artificial Sequence
  SAMD9 targeting guide sequence portion
uccuguauccaccaucuuauuu

SEQ ID NO: 2334 - RNA, 22 nt, Artificial Sequence
  SAMD9 targeting guide sequence portion
uggauacaggaaaacggaggaa

SEQ ID NO: 2335 - RNA, 22 nt, Artificial Sequence
  SAMD9 targeting guide sequence portion
ugguggauacaggaaaacggag

SEQ ID NO: 2336 - RNA, 22 nt, Artificial Sequence
  SAMD9 targeting guide sequence portion
uguauccaccaucuuauuuuac

SEQ ID NO: 2337 - RNA, 22 nt, Artificial Sequence
  SAMD9 targeting guide sequence portion
uguucccguuuccuccguuuuc

SEQ ID NO: 2338 - RNA, 22 nt, Artificial Sequence
  SAMD9 targeting guide sequence portion
uucccguuuccuccguuuuccu

SEQ ID NO: 2339 - RNA, 22 nt, Artificial Sequence
  SAMD9 targeting guide sequence portion
uuccuccguuuuccuguaucca

SEQ ID NO: 2340 - RNA, 22 nt, Artificial Sequence
  SAMD9 targeting guide sequence portion
uuccuguauccaccaucuuauu

SEQ ID NO: 2341 - RNA, 22 nt, Artificial Sequence
  SAMD9 targeting guide sequence portion
uuuccuccguuuuccuguaucc

SEQ ID NO: 2342 - RNA, 22 nt, Artificial Sequence
  SAMD9 targeting guide sequence portion
uuuccuguauccaccaucuuau

SEQ ID NO: 2343 - RNA, 22 nt, Artificial Sequence
  SAMD9 targeting guide sequence portion
uuuuccuguauccaccaucuua

SEQ ID NO: 2344 - RNA, 20 nt, Artificial Sequence
  SAMD9 targeting guide sequence portion
aaaaaaguaaaauaagaugg

SEQ ID NO: 2345 - RNA, 20 nt, Artificial Sequence
  SAMD9 targeting guide sequence portion
aaaaaguaaaauaagauggu

SEQ ID NO: 2346 - RNA, 20 nt, Artificial Sequence
  SAMD9 targeting guide sequence portion
acacugggucaagucuaaaa

SEQ ID NO: 2347 - RNA, 20 nt, Artificial Sequence
  SAMD9 targeting guide sequence portion
accaucuuauuuuacuuuuu

SEQ ID NO: 2348 - RNA, 20 nt, Artificial Sequence
  SAMD9 targeting guide sequence portion
acugggucaagucuaaaaaa

SEQ ID NO: 2349 - RNA, 20 nt, Artificial Sequence
  SAMD9 targeting guide sequence portion
acuuuuuuagacuugaccca

SEQ ID NO: 2350 - RNA, 20 nt, Artificial Sequence
  SAMD9 targeting guide sequence portion
agauacacugggucaagucu

SEQ ID NO: 2351 - RNA, 20 nt, Artificial Sequence
  SAMD9 targeting guide sequence portion
auacacugggucaagucuaa

SEQ ID NO: 2352 - RNA, 20 nt, Artificial Sequence
  SAMD9 targeting guide sequence portion
auccaccaucuuauuuuacu

SEQ ID NO: 2353 - RNA, 20 nt, Artificial Sequence
  SAMD9 targeting guide sequence portion
auuuuacuuuuuuagacuug

SEQ ID NO: 2354 - RNA, 20 nt, Artificial Sequence
  SAMD9 targeting guide sequence portion
caagucuaaaaaaguaaaau

SEQ ID NO: 2355 - RNA, 20 nt, Artificial Sequence
  SAMD9 targeting guide sequence portion
caccaucuuauuuuacuuuu

SEQ ID NO: 2356 - RNA, 20 nt, Artificial Sequence
  SAMD9 targeting guide sequence portion
cacugggucaagucuaaaaa

SEQ ID NO: 2357 - RNA, 20 nt, Artificial Sequence
  SAMD9 targeting guide sequence portion
cagauacacugggucaaguc

SEQ ID NO: 2358 - RNA, 20 nt, Artificial Sequence
  SAMD9 targeting guide sequence portion
ccaccaucuuauuuuacuuu

SEQ ID NO: 2359 - RNA, 20 nt, Artificial Sequence
  SAMD9 targeting guide sequence portion
ccaucuuauuuuacuuuuuu

SEQ ID NO: 2360 - RNA, 20 nt, Artificial Sequence
  SAMD9 targeting guide sequence portion
cuauccaccaucuuauuuua

SEQ ID NO: 2361 - RNA, 20 nt, Artificial Sequence
  SAMD9 targeting guide sequence portion
cucagauacacugggucaag

SEQ ID NO: 2362 - RNA, 20 nt, Artificial Sequence
  SAMD9 targeting guide sequence portion
cugggucaagucuaaaaaag

SEQ ID NO: 2363 - RNA, 20 nt, Artificial Sequence
  SAMD9 targeting guide sequence portion
cuuauuuuacuuuuuuagac

SEQ ID NO: 2364 - RNA, 20 nt, Artificial Sequence
  SAMD9 targeting guide sequence portion
cuuuuuuagacuugacccag

SEQ ID NO: 2365 - RNA, 20 nt, Artificial Sequence
  SAMD9 targeting guide sequence portion
gauacacugggucaagucua

SEQ ID NO: 2366 - RNA, 20 nt, Artificial Sequence
  SAMD9 targeting guide sequence portion
gggucaagucuaaaaaagua

SEQ ID NO: 2367 - RNA, 20 nt, Artificial Sequence
  SAMD9 targeting guide sequence portion
ggucaagucuaaaaaaguaa

SEQ ID NO: 2368 - RNA, 20 nt, Artificial Sequence
  SAMD9 targeting guide sequence portion
gucaagucuaaaaaaguaaa

SEQ ID NO: 2369 - RNA, 20 nt, Artificial Sequence
  SAMD9 targeting guide sequence portion
gucuaaaaaaguaaaauaag

SEQ ID NO: 2370 - RNA, 20 nt, Artificial Sequence
  SAMD9 targeting guide sequence portion
uacacugggucaagucuaaa

SEQ ID NO: 2371 - RNA, 20 nt, Artificial Sequence
  SAMD9 targeting guide sequence portion
uacuuuuuuagacuugaccc

SEQ ID NO: 2372 - RNA, 20 nt, Artificial Sequence
  SAMD9 targeting guide sequence portion
uauccaccaucuuauuuuac

SEQ ID NO: 2373 - RNA, 20 nt, Artificial Sequence
  SAMD9 targeting guide sequence portion
ucaagucuaaaaaaguaaaa

SEQ ID NO: 2374 - RNA, 20 nt, Artificial Sequence
  SAMD9 targeting guide sequence portion
ucagauacacugggucaagu

SEQ ID NO: 2375 - RNA, 20 nt, Artificial Sequence
  SAMD9 targeting guide sequence portion
uccaccaucuuauuuuacuu

SEQ ID NO: 2376 - RNA, 20 nt, Artificial Sequence
  SAMD9 targeting guide sequence portion
ucucagauacacugggucaa

SEQ ID NO: 2377 - RNA, 20 nt, Artificial Sequence
  SAMD9 targeting guide sequence portion
ugggucaagucuaaaaaagu

SEQ ID NO: 2378 - RNA, 20 nt, Artificial Sequence
  SAMD9 targeting guide sequence portion
uuacuuuuuuagacuugacc

SEQ ID NO: 2379 - RNA, 20 nt, Artificial Sequence
  SAMD9 targeting guide sequence portion
uuagacuugacccaguguau

SEQ ID NO: 2380 - RNA, 20 nt, Artificial Sequence
  SAMD9 targeting guide sequence portion
uuuacuuuuuuagacuugac

SEQ ID NO: 2381 - RNA, 20 nt, Artificial Sequence
  SAMD9 targeting guide sequence portion
uuuagacuugacccagugua

SEQ ID NO: 2382 - RNA, 20 nt, Artificial Sequence
  SAMD9 targeting guide sequence portion
uuuuacuuuuuuagacuuga

SEQ ID NO: 2383 - RNA, 20 nt, Artificial Sequence
  SAMD9 targeting guide sequence portion
uuuuagacuugacccagugu

SEQ ID NO: 2384 - RNA, 20 nt, Artificial Sequence
  SAMD9 targeting guide sequence portion
uuuuuagacuugacccagug

SEQ ID NO: 2385 - RNA, 20 nt, Artificial Sequence
  SAMD9 targeting guide sequence portion
uuuuuuagacuugacccagu

SEQ ID NO: 2386 - RNA, 21 nt, Artificial Sequence
  SAMD9 targeting guide sequence portion
aaaaaguaaaauaagauggug

SEQ ID NO: 2387 - RNA, 21 nt, Artificial Sequence
  SAMD9 targeting guide sequence portion
acacugggucaagucuaaaaa

SEQ ID NO: 2388 - RNA, 21 nt, Artificial Sequence
  SAMD9 targeting guide sequence portion
acugggucaagucuaaaaaag

SEQ ID NO: 2389 - RNA, 21 nt, Artificial Sequence
  SAMD9 targeting guide sequence portion
acuuuuuuagacuugacccag

SEQ ID NO: 2390 - RNA, 21 nt, Artificial Sequence
  SAMD9 targeting guide sequence portion
agauacacugggucaagucua

SEQ ID NO: 2391 - RNA, 21 nt, Artificial Sequence
  SAMD9 targeting guide sequence portion
auacacugggucaagucuaaa

SEQ ID NO: 2392 - RNA, 21 nt, Artificial Sequence
  SAMD9 targeting guide sequence portion
auccaccaucuuauuuuacuu

SEQ ID NO: 2393 - RNA, 21 nt, Artificial Sequence
  SAMD9 targeting guide sequence portion
aucucagauacacugggucaa

SEQ ID NO: 2394 - RNA, 21 nt, Artificial Sequence
  SAMD9 targeting guide sequence portion
caccaucuuauuuuacuuuuu

SEQ ID NO: 2395 - RNA, 21 nt, Artificial Sequence
  SAMD9 targeting guide sequence portion
cacugggucaagucuaaaaaa

SEQ ID NO: 2396 - RNA, 21 nt, Artificial Sequence
  SAMD9 targeting guide sequence portion
cagauacacugggucaagucu

SEQ ID NO: 2397 - RNA, 21 nt, Artificial Sequence
  SAMD9 targeting guide sequence portion
ccaccaucuuauuuuacuuuu

SEQ ID NO: 2398 - RNA, 21 nt, Artificial Sequence
  SAMD9 targeting guide sequence portion
cuauccaccaucuuauuuuac

SEQ ID NO: 2399 - RNA, 21 nt, Artificial Sequence
  SAMD9 targeting guide sequence portion
cucagauacacugggucaagu

SEQ ID NO: 2400 - RNA, 21 nt, Artificial Sequence
  SAMD9 targeting guide sequence portion
cugggucaagucuaaaaaagu

SEQ ID NO: 2401 - RNA, 21 nt, Artificial Sequence
  SAMD9 targeting guide sequence portion
cuuuuuuagacuugacccagu

SEQ ID NO: 2402 - RNA, 21 nt, Artificial Sequence
  SAMD9 targeting guide sequence portion
gauacacugggucaagucuaa

SEQ ID NO: 2403 - RNA, 21 nt, Artificial Sequence
  SAMD9 targeting guide sequence portion
gggucaagucuaaaaaaguaa

SEQ ID NO: 2404 - RNA, 21 nt, Artificial Sequence
  SAMD9 targeting guide sequence portion
ggucaagucuaaaaaaguaaa

SEQ ID NO: 2405 - RNA, 21 nt, Artificial Sequence
  SAMD9 targeting guide sequence portion
gucaagucuaaaaaaguaaaa

SEQ ID NO: 2406 - RNA, 21 nt, Artificial Sequence
  SAMD9 targeting guide sequence portion
uacacugggucaagucuaaaa

SEQ ID NO: 2407 - RNA, 21 nt, Artificial Sequence
  SAMD9 targeting guide sequence portion
uacuuuuuuagacuugaccca

SEQ ID NO: 2408 - RNA, 21 nt, Artificial Sequence
  SAMD9 targeting guide sequence portion
uauccaccaucuuauuuuacu

SEQ ID NO: 2409 - RNA, 21 nt, Artificial Sequence
  SAMD9 targeting guide sequence portion
ucagauacacugggucaaguc

SEQ ID NO: 2410 - RNA, 21 nt, Artificial Sequence
  SAMD9 targeting guide sequence portion
uccaccaucuuauuuuacuuu

SEQ ID NO: 2411 - RNA, 21 nt, Artificial Sequence
  SAMD9 targeting guide sequence portion
ucuauccaccaucuuauuuua

SEQ ID NO: 2412 - RNA, 21 nt, Artificial Sequence
  SAMD9 targeting guide sequence portion
ucucagauacacugggucaag

SEQ ID NO: 2413 - RNA, 21 nt, Artificial Sequence
  SAMD9 targeting guide sequence portion
ugggucaagucuaaaaaagua

SEQ ID NO: 2414 - RNA, 21 nt, Artificial Sequence
  SAMD9 targeting guide sequence portion
uuacuuuuuuagacuugaccc

SEQ ID NO: 2415 - RNA, 21 nt, Artificial Sequence
  SAMD9 targeting guide sequence portion
uuagacuugacccaguguauc

SEQ ID NO: 2416 - RNA, 21 nt, Artificial Sequence
  SAMD9 targeting guide sequence portion
uuuacuuuuuuagacuugacc

SEQ ID NO: 2417 - RNA, 21 nt, Artificial Sequence
  SAMD9 targeting guide sequence portion
uuuagacuugacccaguguau

SEQ ID NO: 2418 - RNA, 21 nt, Artificial Sequence
  SAMD9 targeting guide sequence portion
uuuuacuuuuuuagacuugac

SEQ ID NO: 2419 - RNA, 21 nt, Artificial Sequence
  SAMD9 targeting guide sequence portion
uuuuagacuugacccagugua

SEQ ID NO: 2420 - RNA, 21 nt, Artificial Sequence
  SAMD9 targeting guide sequence portion
uuuuuagacuugacccagugu

SEQ ID NO: 2421 - RNA, 21 nt, Artificial Sequence
  SAMD9 targeting guide sequence portion
uuuuuuagacuugacccagug

SEQ ID NO: 2422 - RNA, 22 nt, Artificial Sequence
  SAMD9 targeting guide sequence portion
aaaaaaguaaaauaagauggug

SEQ ID NO: 2423 - RNA, 22 nt, Artificial Sequence
  SAMD9 targeting guide sequence portion
aaaaaguaaaauaagauggugg

SEQ ID NO: 2424 - RNA, 22 nt, Artificial Sequence
  SAMD9 targeting guide sequence portion
acacugggucaagucuaaaaaa

SEQ ID NO: 2425 - RNA, 22 nt, Artificial Sequence
  SAMD9 targeting guide sequence portion
acugggucaagucuaaaaaagu

SEQ ID NO: 2426 - RNA, 22 nt, Artificial Sequence
  SAMD9 targeting guide sequence portion
acuuuuuuagacuugacccagu

SEQ ID NO: 2427 - RNA, 22 nt, Artificial Sequence
  SAMD9 targeting guide sequence portion
agauacacugggucaagucuaa

SEQ ID NO: 2428 - RNA, 22 nt, Artificial Sequence
  SAMD9 targeting guide sequence portion
auacacugggucaagucuaaaa

SEQ ID NO: 2429 - RNA, 22 nt, Artificial Sequence
  SAMD9 targeting guide sequence portion
auccaccaucuuauuuuacuuu

SEQ ID NO: 2430 - RNA, 22 nt, Artificial Sequence
  SAMD9 targeting guide sequence portion
aucucagauacacugggucaag

SEQ ID NO: 2431 - RNA, 22 nt, Artificial Sequence
  SAMD9 targeting guide sequence portion
auuuuacuuuuuuagacuugac

SEQ ID NO: 2432 - RNA, 22 nt, Artificial Sequence
  SAMD9 targeting guide sequence portion
caccaucuuauuuuacuuuuuu

SEQ ID NO: 2433 - RNA, 22 nt, Artificial Sequence
  SAMD9 targeting guide sequence portion
cacugggucaagucuaaaaaag

SEQ ID NO: 2434 - RNA, 22 nt, Artificial Sequence
  SAMD9 targeting guide sequence portion
cagauacacugggucaagucua

SEQ ID NO: 2435 - RNA, 22 nt, Artificial Sequence
  SAMD9 targeting guide sequence portion
ccaccaucuuauuuuacuuuuu

SEQ ID NO: 2436 - RNA, 22 nt, Artificial Sequence
  SAMD9 targeting guide sequence portion
ccaucuuauuuuacuuuuuuag

SEQ ID NO: 2437 - RNA, 22 nt, Artificial Sequence
  SAMD9 targeting guide sequence portion
cuaaaaaaguaaaauaagaugg

SEQ ID NO: 2438 - RNA, 22 nt, Artificial Sequence
  SAMD9 targeting guide sequence portion
cuauccaccaucuuauuuuacu

SEQ ID NO: 2439 - RNA, 22 nt, Artificial Sequence
  SAMD9 targeting guide sequence portion
cucagauacacugggucaaguc

SEQ ID NO: 2440 - RNA, 22 nt, Artificial Sequence
  SAMD9 targeting guide sequence portion
cucuauccaccaucuuauuuua

SEQ ID NO: 2441 - RNA, 22 nt, Artificial Sequence
  SAMD9 targeting guide sequence portion
cugggucaagucuaaaaaagua

SEQ ID NO: 2442 - RNA, 22 nt, Artificial Sequence
  SAMD9 targeting guide sequence portion
cuuuuuuagacuugacccagug

SEQ ID NO: 2443 - RNA, 22 nt, Artificial Sequence
  SAMD9 targeting guide sequence portion
gauacacugggucaagucuaaa

SEQ ID NO: 2444 - RNA, 22 nt, Artificial Sequence
  SAMD9 targeting guide sequence portion
gggucaagucuaaaaaaguaaa

SEQ ID NO: 2445 - RNA, 22 nt, Artificial Sequence
  SAMD9 targeting guide sequence portion
ggucaagucuaaaaaaguaaaa

SEQ ID NO: 2446 - RNA, 22 nt, Artificial Sequence
  SAMD9 targeting guide sequence portion
gucaagucuaaaaaaguaaaau

SEQ ID NO: 2447 - RNA, 22 nt, Artificial Sequence
  SAMD9 targeting guide sequence portion
uacacugggucaagucuaaaaa

SEQ ID NO: 2448 - RNA, 22 nt, Artificial Sequence
  SAMD9 targeting guide sequence portion
uacuuuuuuagacuugacccag

SEQ ID NO: 2449 - RNA, 22 nt, Artificial Sequence
  SAMD9 targeting guide sequence portion
uauccaccaucuuauuuuacuu

SEQ ID NO: 2450 - RNA, 22 nt, Artificial Sequence
  SAMD9 targeting guide sequence portion
uaucucagauacacugggucaa

SEQ ID NO: 2451 - RNA, 22 nt, Artificial Sequence
  SAMD9 targeting guide sequence portion
ucagauacacugggucaagucu

SEQ ID NO: 2452 - RNA, 22 nt, Artificial Sequence
  SAMD9 targeting guide sequence portion
uccaccaucuuauuuuacuuuu

SEQ ID NO: 2453 - RNA, 22 nt, Artificial Sequence
  SAMD9 targeting guide sequence portion
ucuauccaccaucuuauuuuac

SEQ ID NO: 2454 - RNA, 22 nt, Artificial Sequence
  SAMD9 targeting guide sequence portion
ucucagauacacugggucaagu

SEQ ID NO: 2455 - RNA, 22 nt, Artificial Sequence
  SAMD9 targeting guide sequence portion
ugggucaagucuaaaaaaguaa

SEQ ID NO: 2456 - RNA, 22 nt, Artificial Sequence
  SAMD9 targeting guide sequence portion
uuacuuuuuuagacuugaccca

SEQ ID NO: 2457 - RNA, 22 nt, Artificial Sequence
  SAMD9 targeting guide sequence portion
uuagacuugacccaguguaucu

SEQ ID NO: 2458 - RNA, 22 nt, Artificial Sequence
  SAMD9 targeting guide sequence portion
uuuacuuuuuuagacuugaccc

SEQ ID NO: 2459 - RNA, 22 nt, Artificial Sequence
  SAMD9 targeting guide sequence portion
uuuagacuugacccaguguauc

SEQ ID NO: 2460 - RNA, 22 nt, Artificial Sequence
  SAMD9 targeting guide sequence portion
uuuuacuuuuuuagacuugacc

SEQ ID NO: 2461 - RNA, 22 nt, Artificial Sequence
  SAMD9 targeting guide sequence portion
uuuuagacuugacccaguguau

SEQ ID NO: 2462 - RNA, 22 nt, Artificial Sequence
  SAMD9 targeting guide sequence portion
uuuuuagacuugacccagugua

SEQ ID NO: 2463 - RNA, 22 nt, Artificial Sequence
  SAMD9 targeting guide sequence portion
uuuuuuagacuugacccagugu

SEQ ID NO: 2464 - RNA, 20 nt, Artificial Sequence
  SAMD9 targeting guide sequence portion
aaagagugaauggagcguac

SEQ ID NO: 2465 - RNA, 20 nt, Artificial Sequence
  SAMD9 targeting guide sequence portion
aacuacuguggaguacgcuc

SEQ ID NO: 2466 - RNA, 20 nt, Artificial Sequence
  SAMD9 targeting guide sequence portion
aacucugcaaucaaagagug

SEQ ID NO: 2467 - RNA, 20 nt, Artificial Sequence
  SAMD9 targeting guide sequence portion
aagagugaauggagcguacu

SEQ ID NO: 2468 - RNA, 20 nt, Artificial Sequence
  SAMD9 targeting guide sequence portion
aaucaaagagugaauggagc

SEQ ID NO: 2469 - RNA, 20 nt, Artificial Sequence
  SAMD9 targeting guide sequence portion
aauggagcguacuccacagu

SEQ ID NO: 2470 - RNA, 20 nt, Artificial Sequence
  SAMD9 targeting guide sequence portion
acgcuccauucacucuuuga

SEQ ID NO: 2471 - RNA, 20 nt, Artificial Sequence
  SAMD9 targeting guide sequence portion
acuacuguggaguacgcucc

SEQ ID NO: 2472 - RNA, 20 nt, Artificial Sequence
  SAMD9 targeting guide sequence portion
acucugcaaucaaagaguga

SEQ ID NO: 2473 - RNA, 20 nt, Artificial Sequence
  SAMD9 targeting guide sequence portion
acuguggaguacgcuccauu

SEQ ID NO: 2474 - RNA, 20 nt, Artificial Sequence
  SAMD9 targeting guide sequence portion
agagugaauggagcguacuc

SEQ ID NO: 2475 - RNA, 20 nt, Artificial Sequence
  SAMD9 targeting guide sequence portion
aguacgcuccauucacucuu

SEQ ID NO: 2476 - RNA, 20 nt, Artificial Sequence
  SAMD9 targeting guide sequence portion
agugaauggagcguacucca

SEQ ID NO: 2477 - RNA, 20 nt, Artificial Sequence
  SAMD9 targeting guide sequence portion
aucaaagagugaauggagcg

SEQ ID NO: 2478 - RNA, 20 nt, Artificial Sequence
  SAMD9 targeting guide sequence portion
auggagcguacuccacagua

SEQ ID NO: 2479 - RNA, 20 nt, Artificial Sequence
  SAMD9 targeting guide sequence portion
caaagagugaauggagcgua

SEQ ID NO: 2480 - RNA, 20 nt, Artificial Sequence
  SAMD9 targeting guide sequence portion
caaucaaagagugaauggag

SEQ ID NO: 2481 - RNA, 20 nt, Artificial Sequence
  SAMD9 targeting guide sequence portion
ccauucacucuuugauugca

SEQ ID NO: 2482 - RNA, 20 nt, Artificial Sequence
  SAMD9 targeting guide sequence portion
cgcuccauucacucuuugau

SEQ ID NO: 2483 - RNA, 20 nt, Artificial Sequence
  SAMD9 targeting guide sequence portion
cuacuguggaguacgcucca

SEQ ID NO: 2484 - RNA, 20 nt, Artificial Sequence
  SAMD9 targeting guide sequence portion
cuccauucacucuuugauug

SEQ ID NO: 2485 - RNA, 20 nt, Artificial Sequence
  SAMD9 targeting guide sequence portion
cucugcaaucaaagagugaa

SEQ ID NO: 2486 - RNA, 20 nt, Artificial Sequence
  SAMD9 targeting guide sequence portion
cugcaaucaaagagugaaug

SEQ ID NO: 2487 - RNA, 20 nt, Artificial Sequence
  SAMD9 targeting guide sequence portion
cuguggaguacgcuccauuc

SEQ ID NO: 2488 - RNA, 20 nt, Artificial Sequence
  SAMD9 targeting guide sequence portion
gaacuacuguggaguacgcu

SEQ ID NO: 2489 - RNA, 20 nt, Artificial Sequence
  SAMD9 targeting guide sequence portion
gaacucugcaaucaaagagu

SEQ ID NO: 2490 - RNA, 20 nt, Artificial Sequence
  SAMD9 targeting guide sequence portion
gaauggagcguacuccacag

SEQ ID NO: 2491 - RNA, 20 nt, Artificial Sequence
  SAMD9 targeting guide sequence portion
gagcguacuccacaguaguu

SEQ ID NO: 2492 - RNA, 20 nt, Artificial Sequence
  SAMD9 targeting guide sequence portion
gaguacgcuccauucacucu

SEQ ID NO: 2493 - RNA, 20 nt, Artificial Sequence
  SAMD9 targeting guide sequence portion
gagugaauggagcguacucc

SEQ ID NO: 2494 - RNA, 20 nt, Artificial Sequence
  SAMD9 targeting guide sequence portion
gcaaucaaagagugaaugga

SEQ ID NO: 2495 - RNA, 20 nt, Artificial Sequence
  SAMD9 targeting guide sequence portion
gcuccauucacucuuugauu

SEQ ID NO: 2496 - RNA, 20 nt, Artificial Sequence
  SAMD9 targeting guide sequence portion
ggaacuacuguggaguacgc

SEQ ID NO: 2497 - RNA, 20 nt, Artificial Sequence
  SAMD9 targeting guide sequence portion
ggagcguacuccacaguagu

SEQ ID NO: 2498 - RNA, 20 nt, Artificial Sequence
  SAMD9 targeting guide sequence portion
ggaguacgcuccauucacuc

SEQ ID NO: 2499 - RNA, 20 nt, Artificial Sequence
  SAMD9 targeting guide sequence portion
gggaacuacuguggaguacg

SEQ ID NO: 2500 - RNA, 20 nt, Artificial Sequence
  SAMD9 targeting guide sequence portion
guacgcuccauucacucuuu

SEQ ID NO: 2501 - RNA, 20 nt, Artificial Sequence
  SAMD9 targeting guide sequence portion
gugaauggagcguacuccac

SEQ ID NO: 2502 - RNA, 20 nt, Artificial Sequence
  SAMD9 targeting guide sequence portion
guggaguacgcuccauucac

SEQ ID NO: 2503 - RNA, 20 nt, Artificial Sequence
  SAMD9 targeting guide sequence portion
gugggaacuacuguggagua

SEQ ID NO: 2504 - RNA, 20 nt, Artificial Sequence
  SAMD9 targeting guide sequence portion
uacgcuccauucacucuuug

SEQ ID NO: 2505 - RNA, 20 nt, Artificial Sequence
  SAMD9 targeting guide sequence portion
uacuguggaguacgcuccau

SEQ ID NO: 2506 - RNA, 20 nt, Artificial Sequence
  SAMD9 targeting guide sequence portion
ucaaagagugaauggagcgu

SEQ ID NO: 2507 - RNA, 20 nt, Artificial Sequence
  SAMD9 targeting guide sequence portion
uccauucacucuuugauugc

SEQ ID NO: 2508 - RNA, 20 nt, Artificial Sequence
  SAMD9 targeting guide sequence portion
ucugcaaucaaagagugaau

SEQ ID NO: 2509 - RNA, 20 nt, Artificial Sequence
  SAMD9 targeting guide sequence portion
ugaauggagcguacuccaca

SEQ ID NO: 2510 - RNA, 20 nt, Artificial Sequence
  SAMD9 targeting guide sequence portion
ugcaaucaaagagugaaugg

SEQ ID NO: 2511 - RNA, 20 nt, Artificial Sequence
  SAMD9 targeting guide sequence portion
uggagcguacuccacaguag

SEQ ID NO: 2512 - RNA, 20 nt, Artificial Sequence
  SAMD9 targeting guide sequence portion
uggaguacgcuccauucacu

SEQ ID NO: 2513 - RNA, 20 nt, Artificial Sequence
  SAMD9 targeting guide sequence portion
ugggaacuacuguggaguac

SEQ ID NO: 2514 - RNA, 20 nt, Artificial Sequence
  SAMD9 targeting guide sequence portion
uguggaguacgcuccauuca

SEQ ID NO: 2515 - RNA, 20 nt, Artificial Sequence
  SAMD9 targeting guide sequence portion
ugugggaacuacuguggagu

SEQ ID NO: 2516 - RNA, 21 nt, Artificial Sequence
  SAMD9 targeting guide sequence portion
aaagagugaauggagcguacu

SEQ ID NO: 2517 - RNA, 21 nt, Artificial Sequence
  SAMD9 targeting guide sequence portion
aacuacuguggaguacgcucc

SEQ ID NO: 2518 - RNA, 21 nt, Artificial Sequence
  SAMD9 targeting guide sequence portion
aacucugcaaucaaagaguga

SEQ ID NO: 2519 - RNA, 21 nt, Artificial Sequence
  SAMD9 targeting guide sequence portion
aagagugaauggagcguacuc

SEQ ID NO: 2520 - RNA, 21 nt, Artificial Sequence
  SAMD9 targeting guide sequence portion
aaucaaagagugaauggagcg

SEQ ID NO: 2521 - RNA, 21 nt, Artificial Sequence
  SAMD9 targeting guide sequence portion
aauggagcguacuccacagua

SEQ ID NO: 2522 - RNA, 21 nt, Artificial Sequence
  SAMD9 targeting guide sequence portion
acgcuccauucacucuuugau

SEQ ID NO: 2523 - RNA, 21 nt, Artificial Sequence
  SAMD9 targeting guide sequence portion
acuacuguggaguacgcucca

SEQ ID NO: 2524 - RNA, 21 nt, Artificial Sequence
  SAMD9 targeting guide sequence portion
acucugcaaucaaagagugaa

SEQ ID NO: 2525 - RNA, 21 nt, Artificial Sequence
  SAMD9 targeting guide sequence portion
acuguggaguacgcuccauuc

SEQ ID NO: 2526 - RNA, 21 nt, Artificial Sequence
  SAMD9 targeting guide sequence portion
agaacucugcaaucaaagagu

SEQ ID NO: 2527 - RNA, 21 nt, Artificial Sequence
  SAMD9 targeting guide sequence portion
agagugaauggagcguacucc

SEQ ID NO: 2528 - RNA, 21 nt, Artificial Sequence
  SAMD9 targeting guide sequence portion
aguacgcuccauucacucuuu

SEQ ID NO: 2529 - RNA, 21 nt, Artificial Sequence
  SAMD9 targeting guide sequence portion
agugaauggagcguacuccac

SEQ ID NO: 2530 - RNA, 21 nt, Artificial Sequence
  SAMD9 targeting guide sequence portion
aucaaagagugaauggagcgu

SEQ ID NO: 2531 - RNA, 21 nt, Artificial Sequence
  SAMD9 targeting guide sequence portion
auggagcguacuccacaguag

SEQ ID NO: 2532 - RNA, 21 nt, Artificial Sequence
  SAMD9 targeting guide sequence portion
augugggaacuacuguggagu

SEQ ID NO: 2533 - RNA, 21 nt, Artificial Sequence
  SAMD9 targeting guide sequence portion
caaagagugaauggagcguac

SEQ ID NO: 2534 - RNA, 21 nt, Artificial Sequence
  SAMD9 targeting guide sequence portion
caaucaaagagugaauggagc

SEQ ID NO: 2535 - RNA, 21 nt, Artificial Sequence
  SAMD9 targeting guide sequence portion
ccauucacucuuugauugcag

SEQ ID NO: 2536 - RNA, 21 nt, Artificial Sequence
  SAMD9 targeting guide sequence portion
cgcuccauucacucuuugauu

SEQ ID NO: 2537 - RNA, 21 nt, Artificial Sequence
  SAMD9 targeting guide sequence portion
cuacuguggaguacgcuccau

SEQ ID NO: 2538 - RNA, 21 nt, Artificial Sequence
  SAMD9 targeting guide sequence portion
cuccauucacucuuugauugc

SEQ ID NO: 2539 - RNA, 21 nt, Artificial Sequence
  SAMD9 targeting guide sequence portion
cucugcaaucaaagagugaau

SEQ ID NO: 2540 - RNA, 21 nt, Artificial Sequence
  SAMD9 targeting guide sequence portion
cugcaaucaaagagugaaugg

SEQ ID NO: 2541 - RNA, 21 nt, Artificial Sequence
  SAMD9 targeting guide sequence portion
cuguggaguacgcuccauuca

SEQ ID NO: 2542 - RNA, 21 nt, Artificial Sequence
  SAMD9 targeting guide sequence portion
gaacuacuguggaguacgcuc

SEQ ID NO: 2543 - RNA, 21 nt, Artificial Sequence
  SAMD9 targeting guide sequence portion
gaacucugcaaucaaagagug

SEQ ID NO: 2544 - RNA, 21 nt, Artificial Sequence
  SAMD9 targeting guide sequence portion
gaauggagcguacuccacagu

SEQ ID NO: 2545 - RNA, 21 nt, Artificial Sequence
  SAMD9 targeting guide sequence portion
gagcguacuccacaguaguuc

SEQ ID NO: 2546 - RNA, 21 nt, Artificial Sequence
  SAMD9 targeting guide sequence portion
gaguacgcuccauucacucuu

SEQ ID NO: 2547 - RNA, 21 nt, Artificial Sequence
  SAMD9 targeting guide sequence portion
gagugaauggagcguacucca

SEQ ID NO: 2548 - RNA, 21 nt, Artificial Sequence
  SAMD9 targeting guide sequence portion
gcaaucaaagagugaauggag

SEQ ID NO: 2549 - RNA, 21 nt, Artificial Sequence
  SAMD9 targeting guide sequence portion
gcuccauucacucuuugauug

SEQ ID NO: 2550 - RNA, 21 nt, Artificial Sequence
  SAMD9 targeting guide sequence portion
ggaacuacuguggaguacgcu

SEQ ID NO: 2551 - RNA, 21 nt, Artificial Sequence
  SAMD9 targeting guide sequence portion
ggagcguacuccacaguaguu

SEQ ID NO: 2552 - RNA, 21 nt, Artificial Sequence
  SAMD9 targeting guide sequence portion
ggaguacgcuccauucacucu

SEQ ID NO: 2553 - RNA, 21 nt, Artificial Sequence
  SAMD9 targeting guide sequence portion
gggaacuacuguggaguacgc

SEQ ID NO: 2554 - RNA, 21 nt, Artificial Sequence
  SAMD9 targeting guide sequence portion
guacgcuccauucacucuuug

SEQ ID NO: 2555 - RNA, 21 nt, Artificial Sequence
  SAMD9 targeting guide sequence portion
gugaauggagcguacuccaca

SEQ ID NO: 2556 - RNA, 21 nt, Artificial Sequence
  SAMD9 targeting guide sequence portion
guggaguacgcuccauucacu

SEQ ID NO: 2557 - RNA, 21 nt, Artificial Sequence
  SAMD9 targeting guide sequence portion
gugggaacuacuguggaguac

SEQ ID NO: 2558 - RNA, 21 nt, Artificial Sequence
  SAMD9 targeting guide sequence portion
uacgcuccauucacucuuuga

SEQ ID NO: 2559 - RNA, 21 nt, Artificial Sequence
  SAMD9 targeting guide sequence portion
uacuguggaguacgcuccauu

SEQ ID NO: 2560 - RNA, 21 nt, Artificial Sequence
  SAMD9 targeting guide sequence portion
ucaaagagugaauggagcgua

SEQ ID NO: 2561 - RNA, 21 nt, Artificial Sequence
  SAMD9 targeting guide sequence portion
uccauucacucuuugauugca

SEQ ID NO: 2562 - RNA, 21 nt, Artificial Sequence
  SAMD9 targeting guide sequence portion
ucugcaaucaaagagugaaug

SEQ ID NO: 2563 - RNA, 21 nt, Artificial Sequence
  SAMD9 targeting guide sequence portion
ugaauggagcguacuccacag

SEQ ID NO: 2564 - RNA, 21 nt, Artificial Sequence
  SAMD9 targeting guide sequence portion
ugcaaucaaagagugaaugga

SEQ ID NO: 2565 - RNA, 21 nt, Artificial Sequence
  SAMD9 targeting guide sequence portion
uggagcguacuccacaguagu

SEQ ID NO: 2566 - RNA, 21 nt, Artificial Sequence
  SAMD9 targeting guide sequence portion
uggaguacgcuccauucacuc

SEQ ID NO: 2567 - RNA, 21 nt, Artificial Sequence
  SAMD9 targeting guide sequence portion
ugggaacuacuguggaguacg

SEQ ID NO: 2568 - RNA, 21 nt, Artificial Sequence
  SAMD9 targeting guide sequence portion
uguggaguacgcuccauucac

SEQ ID NO: 2569 - RNA, 21 nt, Artificial Sequence
  SAMD9 targeting guide sequence portion
ugugggaacuacuguggagua

SEQ ID NO: 2570 - RNA, 22 nt, Artificial Sequence
  SAMD9 targeting guide sequence portion
aaagagugaauggagcguacuc

SEQ ID NO: 2571 - RNA, 22 nt, Artificial Sequence
  SAMD9 targeting guide sequence portion
aacuacuguggaguacgcucca

SEQ ID NO: 2572 - RNA, 22 nt, Artificial Sequence
  SAMD9 targeting guide sequence portion
aacucugcaaucaaagagugaa

SEQ ID NO: 2573 - RNA, 22 nt, Artificial Sequence
  SAMD9 targeting guide sequence portion
aagagugaauggagcguacucc

SEQ ID NO: 2574 - RNA, 22 nt, Artificial Sequence
  SAMD9 targeting guide sequence portion
aaucaaagagugaauggagcgu

SEQ ID NO: 2575 - RNA, 22 nt, Artificial Sequence
  SAMD9 targeting guide sequence portion
aauggagcguacuccacaguag

SEQ ID NO: 2576 - RNA, 22 nt, Artificial Sequence
  SAMD9 targeting guide sequence portion
aaugugggaacuacuguggagu

SEQ ID NO: 2577 - RNA, 22 nt, Artificial Sequence
  SAMD9 targeting guide sequence portion
acgcuccauucacucuuugauu

SEQ ID NO: 2578 - RNA, 22 nt, Artificial Sequence
  SAMD9 targeting guide sequence portion
acuacuguggaguacgcuccau

SEQ ID NO: 2579 - RNA, 22 nt, Artificial Sequence
  SAMD9 targeting guide sequence portion
acucugcaaucaaagagugaau

SEQ ID NO: 2580 - RNA, 22 nt, Artificial Sequence
  SAMD9 targeting guide sequence portion
acuguggaguacgcuccauuca

SEQ ID NO: 2581 - RNA, 22 nt, Artificial Sequence
  SAMD9 targeting guide sequence portion
agaacucugcaaucaaagagug

SEQ ID NO: 2582 - RNA, 22 nt, Artificial Sequence
  SAMD9 targeting guide sequence portion
agagugaauggagcguacucca

SEQ ID NO: 2583 - RNA, 22 nt, Artificial Sequence
  SAMD9 targeting guide sequence portion
aguacgcuccauucacucuuug

SEQ ID NO: 2584 - RNA, 22 nt, Artificial Sequence
  SAMD9 targeting guide sequence portion
agugaauggagcguacuccaca

SEQ ID NO: 2585 - RNA, 22 nt, Artificial Sequence
  SAMD9 targeting guide sequence portion
aucaaagagugaauggagcgua

SEQ ID NO: 2586 - RNA, 22 nt, Artificial Sequence
  SAMD9 targeting guide sequence portion
auggagcguacuccacaguagu

SEQ ID NO: 2587 - RNA, 22 nt, Artificial Sequence
  SAMD9 targeting guide sequence portion
augugggaacuacuguggagua

SEQ ID NO: 2588 - RNA, 22 nt, Artificial Sequence
  SAMD9 targeting guide sequence portion
caaagagugaauggagcguacu

SEQ ID NO: 2589 - RNA, 22 nt, Artificial Sequence
  SAMD9 targeting guide sequence portion
caaucaaagagugaauggagcg

SEQ ID NO: 2590 - RNA, 22 nt, Artificial Sequence
  SAMD9 targeting guide sequence portion
ccauucacucuuugauugcaga

SEQ ID NO: 2591 - RNA, 22 nt, Artificial Sequence
  SAMD9 targeting guide sequence portion
cgcuccauucacucuuugauug

SEQ ID NO: 2592 - RNA, 22 nt, Artificial Sequence
  SAMD9 targeting guide sequence portion
cuacuguggaguacgcuccauu

SEQ ID NO: 2593 - RNA, 22 nt, Artificial Sequence
  SAMD9 targeting guide sequence portion
cuccauucacucuuugauugca

SEQ ID NO: 2594 - RNA, 22 nt, Artificial Sequence
  SAMD9 targeting guide sequence portion
cucugcaaucaaagagugaaug

SEQ ID NO: 2595 - RNA, 22 nt, Artificial Sequence
  SAMD9 targeting guide sequence portion
cugcaaucaaagagugaaugga

SEQ ID NO: 2596 - RNA, 22 nt, Artificial Sequence
  SAMD9 targeting guide sequence portion
cuguggaguacgcuccauucac

SEQ ID NO: 2597 - RNA, 22 nt, Artificial Sequence
  SAMD9 targeting guide sequence portion
gaacuacuguggaguacgcucc

SEQ ID NO: 2598 - RNA, 22 nt, Artificial Sequence
  SAMD9 targeting guide sequence portion
gaacucugcaaucaaagaguga

SEQ ID NO: 2599 - RNA, 22 nt, Artificial Sequence
  SAMD9 targeting guide sequence portion
gaauggagcguacuccacagua

SEQ ID NO: 2600 - RNA, 22 nt, Artificial Sequence
  SAMD9 targeting guide sequence portion
gagaacucugcaaucaaagagu

SEQ ID NO: 2601 - RNA, 22 nt, Artificial Sequence
  SAMD9 targeting guide sequence portion
gagcguacuccacaguaguucc

SEQ ID NO: 2602 - RNA, 22 nt, Artificial Sequence
  SAMD9 targeting guide sequence portion
gaguacgcuccauucacucuuu

SEQ ID NO: 2603 - RNA, 22 nt, Artificial Sequence
  SAMD9 targeting guide sequence portion
gagugaauggagcguacuccac

SEQ ID NO: 2604 - RNA, 22 nt, Artificial Sequence
  SAMD9 targeting guide sequence portion
gcaaucaaagagugaauggagc

SEQ ID NO: 2605 - RNA, 22 nt, Artificial Sequence
  SAMD9 targeting guide sequence portion
gcuccauucacucuuugauugc

SEQ ID NO: 2606 - RNA, 22 nt, Artificial Sequence
  SAMD9 targeting guide sequence portion
ggaacuacuguggaguacgcuc

SEQ ID NO: 2607 - RNA, 22 nt, Artificial Sequence
  SAMD9 targeting guide sequence portion
ggagcguacuccacaguaguuc

SEQ ID NO: 2608 - RNA, 22 nt, Artificial Sequence
  SAMD9 targeting guide sequence portion
ggaguacgcuccauucacucuu

SEQ ID NO: 2609 - RNA, 22 nt, Artificial Sequence
  SAMD9 targeting guide sequence portion
gggaacuacuguggaguacgcu

SEQ ID NO: 2610 - RNA, 22 nt, Artificial Sequence
  SAMD9 targeting guide sequence portion
guacgcuccauucacucuuuga

SEQ ID NO: 2611 - RNA, 22 nt, Artificial Sequence
  SAMD9 targeting guide sequence portion
gugaauggagcguacuccacag

SEQ ID NO: 2612 - RNA, 22 nt, Artificial Sequence
  SAMD9 targeting guide sequence portion
guggaguacgcuccauucacuc

SEQ ID NO: 2613 - RNA, 22 nt, Artificial Sequence
  SAMD9 targeting guide sequence portion
gugggaacuacuguggaguacg

SEQ ID NO: 2614 - RNA, 22 nt, Artificial Sequence
  SAMD9 targeting guide sequence portion
uacgcuccauucacucuuugau

SEQ ID NO: 2615 - RNA, 22 nt, Artificial Sequence
  SAMD9 targeting guide sequence portion
uacuguggaguacgcuccauuc

SEQ ID NO: 2616 - RNA, 22 nt, Artificial Sequence
  SAMD9 targeting guide sequence portion
ucaaagagugaauggagcguac

SEQ ID NO: 2617 - RNA, 22 nt, Artificial Sequence
  SAMD9 targeting guide sequence portion
uccauucacucuuugauugcag

SEQ ID NO: 2618 - RNA, 22 nt, Artificial Sequence
  SAMD9 targeting guide sequence portion
ucugcaaucaaagagugaaugg

SEQ ID NO: 2619 - RNA, 22 nt, Artificial Sequence
  SAMD9 targeting guide sequence portion
ugaauggagcguacuccacagu

SEQ ID NO: 2620 - RNA, 22 nt, Artificial Sequence
  SAMD9 targeting guide sequence portion
ugcaaucaaagagugaauggag

SEQ ID NO: 2621 - RNA, 22 nt, Artificial Sequence
  SAMD9 targeting guide sequence portion
uggagcguacuccacaguaguu

SEQ ID NO: 2622 - RNA, 22 nt, Artificial Sequence
  SAMD9 targeting guide sequence portion
uggaguacgcuccauucacucu

SEQ ID NO: 2623 - RNA, 22 nt, Artificial Sequence
  SAMD9 targeting guide sequence portion
ugggaacuacuguggaguacgc

SEQ ID NO: 2624 - RNA, 22 nt, Artificial Sequence
  SAMD9 targeting guide sequence portion
uguggaguacgcuccauucacu

SEQ ID NO: 2625 - RNA, 22 nt, Artificial Sequence
  SAMD9 targeting guide sequence portion
ugugggaacuacuguggaguac

SEQ ID NO: 2626 - RNA, 20 nt, Artificial Sequence
  SAMD9 targeting guide sequence portion
aaagagugaaugacgcguac

SEQ ID NO: 2627 - RNA, 20 nt, Artificial Sequence
  SAMD9 targeting guide sequence portion
aacuacuguggaguacgcgu

SEQ ID NO: 2628 - RNA, 20 nt, Artificial Sequence
  SAMD9 targeting guide sequence portion
aagagugaaugacgcguacu

SEQ ID NO: 2629 - RNA, 20 nt, Artificial Sequence
  SAMD9 targeting guide sequence portion
aaucaaagagugaaugacgc

SEQ ID NO: 2630 - RNA, 20 nt, Artificial Sequence
  SAMD9 targeting guide sequence portion
aaugacgcguacuccacagu

SEQ ID NO: 2631 - RNA, 20 nt, Artificial Sequence
  SAMD9 targeting guide sequence portion
acgcguacuccacaguaguu

SEQ ID NO: 2632 - RNA, 20 nt, Artificial Sequence
  SAMD9 targeting guide sequence portion
acgcgucauucacucuuuga

SEQ ID NO: 2633 - RNA, 20 nt, Artificial Sequence
  SAMD9 targeting guide sequence portion
acuacuguggaguacgcguc

SEQ ID NO: 2634 - RNA, 20 nt, Artificial Sequence
  SAMD9 targeting guide sequence portion
acuguggaguacgcgucauu

SEQ ID NO: 2635 - RNA, 20 nt, Artificial Sequence
  SAMD9 targeting guide sequence portion
agagugaaugacgcguacuc

SEQ ID NO: 2636 - RNA, 20 nt, Artificial Sequence
  SAMD9 targeting guide sequence portion
aguacgcgucauucacucuu

SEQ ID NO: 2637 - RNA, 20 nt, Artificial Sequence
  SAMD9 targeting guide sequence portion
agugaaugacgcguacucca

SEQ ID NO: 2638 - RNA, 20 nt, Artificial Sequence
  SAMD9 targeting guide sequence portion
aucaaagagugaaugacgcg

SEQ ID NO: 2639 - RNA, 20 nt, Artificial Sequence
  SAMD9 targeting guide sequence portion
augacgcguacuccacagua

SEQ ID NO: 2640 - RNA, 20 nt, Artificial Sequence
  SAMD9 targeting guide sequence portion
augugggaacuacuguggag

SEQ ID NO: 2641 - RNA, 20 nt, Artificial Sequence
  SAMD9 targeting guide sequence portion
caaagagugaaugacgcgua

SEQ ID NO: 2642 - RNA, 20 nt, Artificial Sequence
  SAMD9 targeting guide sequence portion
caaucaaagagugaaugacg

SEQ ID NO: 2643 - RNA, 20 nt, Artificial Sequence
  SAMD9 targeting guide sequence portion
cgcguacuccacaguaguuc

SEQ ID NO: 2644 - RNA, 20 nt, Artificial Sequence
  SAMD9 targeting guide sequence portion
cgcgucauucacucuuugau

SEQ ID NO: 2645 - RNA, 20 nt, Artificial Sequence
  SAMD9 targeting guide sequence portion
cgucauucacucuuugauug

SEQ ID NO: 2646 - RNA, 20 nt, Artificial Sequence
  SAMD9 targeting guide sequence portion
cuacuguggaguacgcguca

SEQ ID NO: 2647 - RNA, 20 nt, Artificial Sequence
  SAMD9 targeting guide sequence portion
cuguggaguacgcgucauuc

SEQ ID NO: 2648 - RNA, 20 nt, Artificial Sequence
  SAMD9 targeting guide sequence portion
gaacuacuguggaguacgcg

SEQ ID NO: 2649 - RNA, 20 nt, Artificial Sequence
  SAMD9 targeting guide sequence portion
gaaugacgcguacuccacag

SEQ ID NO: 2650 - RNA, 20 nt, Artificial Sequence
  SAMD9 targeting guide sequence portion
gacgcguacuccacaguagu

SEQ ID NO: 2651 - RNA, 20 nt, Artificial Sequence
  SAMD9 targeting guide sequence portion
gaguacgcgucauucacucu

SEQ ID NO: 2652 - RNA, 20 nt, Artificial Sequence
  SAMD9 targeting guide sequence portion
gagugaaugacgcguacucc

SEQ ID NO: 2653 - RNA, 20 nt, Artificial Sequence
  SAMD9 targeting guide sequence portion
gcaaucaaagagugaaugac

SEQ ID NO: 2654 - RNA, 20 nt, Artificial Sequence
  SAMD9 targeting guide sequence portion
gcgucauucacucuuugauu

SEQ ID NO: 2655 - RNA, 20 nt, Artificial Sequence
  SAMD9 targeting guide sequence portion
ggaguacgcgucauucacuc

SEQ ID NO: 2656 - RNA, 20 nt, Artificial Sequence
  SAMD9 targeting guide sequence portion
guacgcgucauucacucuuu

SEQ ID NO: 2657 - RNA, 20 nt, Artificial Sequence
  SAMD9 targeting guide sequence portion
gucauucacucuuugauugc

SEQ ID NO: 2658 - RNA, 20 nt, Artificial Sequence
  SAMD9 targeting guide sequence portion
gugaaugacgcguacuccac

SEQ ID NO: 2659 - RNA, 20 nt, Artificial Sequence
  SAMD9 targeting guide sequence portion
guggaguacgcgucauucac

SEQ ID NO: 2660 - RNA, 20 nt, Artificial Sequence
  SAMD9 targeting guide sequence portion
uacgcgucauucacucuuug

SEQ ID NO: 2661 - RNA, 20 nt, Artificial Sequence
  SAMD9 targeting guide sequence portion
uacuguggaguacgcgucau

SEQ ID NO: 2662 - RNA, 20 nt, Artificial Sequence
  SAMD9 targeting guide sequence portion
ucaaagagugaaugacgcgu

SEQ ID NO: 2663 - RNA, 20 nt, Artificial Sequence
  SAMD9 targeting guide sequence portion
ugaaugacgcguacuccaca

SEQ ID NO: 2664 - RNA, 20 nt, Artificial Sequence
  SAMD9 targeting guide sequence portion
ugacgcguacuccacaguag

SEQ ID NO: 2665 - RNA, 20 nt, Artificial Sequence
  SAMD9 targeting guide sequence portion
ugcaaucaaagagugaauga

SEQ ID NO: 2666 - RNA, 20 nt, Artificial Sequence
  SAMD9 targeting guide sequence portion
uggaguacgcgucauucacu

SEQ ID NO: 2667 - RNA, 20 nt, Artificial Sequence
  SAMD9 targeting guide sequence portion
uguggaguacgcgucauuca

SEQ ID NO: 2668 - RNA, 21 nt, Artificial Sequence
  SAMD9 targeting guide sequence portion
aaagagugaaugacgcguacu

SEQ ID NO: 2669 - RNA, 21 nt, Artificial Sequence
  SAMD9 targeting guide sequence portion
aacuacuguggaguacgcguc

SEQ ID NO: 2670 - RNA, 21 nt, Artificial Sequence
  SAMD9 targeting guide sequence portion
aagagugaaugacgcguacuc

SEQ ID NO: 2671 - RNA, 21 nt, Artificial Sequence
  SAMD9 targeting guide sequence portion
aaucaaagagugaaugacgcg

SEQ ID NO: 2672 - RNA, 21 nt, Artificial Sequence
  SAMD9 targeting guide sequence portion
aaugacgcguacuccacagua

SEQ ID NO: 2673 - RNA, 21 nt, Artificial Sequence
  SAMD9 targeting guide sequence portion
aaugugggaacuacuguggag

SEQ ID NO: 2674 - RNA, 21 nt, Artificial Sequence
  SAMD9 targeting guide sequence portion
acgcguacuccacaguaguuc

SEQ ID NO: 2675 - RNA, 21 nt, Artificial Sequence
  SAMD9 targeting guide sequence portion
acgcgucauucacucuuugau

SEQ ID NO: 2676 - RNA, 21 nt, Artificial Sequence
  SAMD9 targeting guide sequence portion
acuacuguggaguacgcguca

SEQ ID NO: 2677 - RNA, 21 nt, Artificial Sequence
  SAMD9 targeting guide sequence portion
acuguggaguacgcgucauuc

SEQ ID NO: 2678 - RNA, 21 nt, Artificial Sequence
  SAMD9 targeting guide sequence portion
agagugaaugacgcguacucc

SEQ ID NO: 2679 - RNA, 21 nt, Artificial Sequence
  SAMD9 targeting guide sequence portion
aguacgcgucauucacucuuu

SEQ ID NO: 2680 - RNA, 21 nt, Artificial Sequence
  SAMD9 targeting guide sequence portion
agugaaugacgcguacuccac

SEQ ID NO: 2681 - RNA, 21 nt, Artificial Sequence
  SAMD9 targeting guide sequence portion
aucaaagagugaaugacgcgu

SEQ ID NO: 2682 - RNA, 21 nt, Artificial Sequence
  SAMD9 targeting guide sequence portion
augacgcguacuccacaguag

SEQ ID NO: 2683 - RNA, 21 nt, Artificial Sequence
  SAMD9 targeting guide sequence portion
caaagagugaaugacgcguac

SEQ ID NO: 2684 - RNA, 21 nt, Artificial Sequence
  SAMD9 targeting guide sequence portion
caaucaaagagugaaugacgc

SEQ ID NO: 2685 - RNA, 21 nt, Artificial Sequence
  SAMD9 targeting guide sequence portion
cgcguacuccacaguaguucc

SEQ ID NO: 2686 - RNA, 21 nt, Artificial Sequence
  SAMD9 targeting guide sequence portion
cgcgucauucacucuuugauu

SEQ ID NO: 2687 - RNA, 21 nt, Artificial Sequence
  SAMD9 targeting guide sequence portion
cgucauucacucuuugauugc

SEQ ID NO: 2688 - RNA, 21 nt, Artificial Sequence
  SAMD9 targeting guide sequence portion
cuacuguggaguacgcgucau

SEQ ID NO: 2689 - RNA, 21 nt, Artificial Sequence
  SAMD9 targeting guide sequence portion
cugcaaucaaagagugaauga

SEQ ID NO: 2690 - RNA, 21 nt, Artificial Sequence
  SAMD9 targeting guide sequence portion
cuguggaguacgcgucauuca

SEQ ID NO: 2691 - RNA, 21 nt, Artificial Sequence
  SAMD9 targeting guide sequence portion
gaacuacuguggaguacgcgu

SEQ ID NO: 2692 - RNA, 21 nt, Artificial Sequence
  SAMD9 targeting guide sequence portion
gaaugacgcguacuccacagu

SEQ ID NO: 2693 - RNA, 21 nt, Artificial Sequence
  SAMD9 targeting guide sequence portion
gacgcguacuccacaguaguu

SEQ ID NO: 2694 - RNA, 21 nt, Artificial Sequence
  SAMD9 targeting guide sequence portion
gaguacgcgucauucacucuu

SEQ ID NO: 2695 - RNA, 21 nt, Artificial Sequence
  SAMD9 targeting guide sequence portion
gagugaaugacgcguacucca

SEQ ID NO: 2696 - RNA, 21 nt, Artificial Sequence
  SAMD9 targeting guide sequence portion
gcaaucaaagagugaaugacg

SEQ ID NO: 2697 - RNA, 21 nt, Artificial Sequence
  SAMD9 targeting guide sequence portion
gcgucauucacucuuugauug

SEQ ID NO: 2698 - RNA, 21 nt, Artificial Sequence
  SAMD9 targeting guide sequence portion
ggaacuacuguggaguacgcg

SEQ ID NO: 2699 - RNA, 21 nt, Artificial Sequence
  SAMD9 targeting guide sequence portion
ggaguacgcgucauucacucu

SEQ ID NO: 2700 - RNA, 21 nt, Artificial Sequence
  SAMD9 targeting guide sequence portion
guacgcgucauucacucuuug

SEQ ID NO: 2701 - RNA, 21 nt, Artificial Sequence
  SAMD9 targeting guide sequence portion
gucauucacucuuugauugca

SEQ ID NO: 2702 - RNA, 21 nt, Artificial Sequence
  SAMD9 targeting guide sequence portion
gugaaugacgcguacuccaca

SEQ ID NO: 2703 - RNA, 21 nt, Artificial Sequence
  SAMD9 targeting guide sequence portion
guggaguacgcgucauucacu

SEQ ID NO: 2704 - RNA, 21 nt, Artificial Sequence
  SAMD9 targeting guide sequence portion
uacgcgucauucacucuuuga

SEQ ID NO: 2705 - RNA, 21 nt, Artificial Sequence
  SAMD9 targeting guide sequence portion
uacuguggaguacgcgucauu

SEQ ID NO: 2706 - RNA, 21 nt, Artificial Sequence
  SAMD9 targeting guide sequence portion
ucaaagagugaaugacgcgua

SEQ ID NO: 2707 - RNA, 21 nt, Artificial Sequence
  SAMD9 targeting guide sequence portion
ugaaugacgcguacuccacag

SEQ ID NO: 2708 - RNA, 21 nt, Artificial Sequence
  SAMD9 targeting guide sequence portion
ugacgcguacuccacaguagu

SEQ ID NO: 2709 - RNA, 21 nt, Artificial Sequence
  SAMD9 targeting guide sequence portion
ugcaaucaaagagugaaugac

SEQ ID NO: 2710 - RNA, 21 nt, Artificial Sequence
  SAMD9 targeting guide sequence portion
uggaguacgcgucauucacuc

SEQ ID NO: 2711 - RNA, 21 nt, Artificial Sequence
  SAMD9 targeting guide sequence portion
uguggaguacgcgucauucac

SEQ ID NO: 2712 - RNA, 22 nt, Artificial Sequence
  SAMD9 targeting guide sequence portion
aaagagugaaugacgcguacuc

SEQ ID NO: 2713 - RNA, 22 nt, Artificial Sequence
  SAMD9 targeting guide sequence portion
aacuacuguggaguacgcguca

SEQ ID NO: 2714 - RNA, 22 nt, Artificial Sequence
  SAMD9 targeting guide sequence portion
aagagugaaugacgcguacucc

SEQ ID NO: 2715 - RNA, 22 nt, Artificial Sequence
  SAMD9 targeting guide sequence portion
aaucaaagagugaaugacgcgu

SEQ ID NO: 2716 - RNA, 22 nt, Artificial Sequence
  SAMD9 targeting guide sequence portion
aaugacgcguacuccacaguag

SEQ ID NO: 2717 - RNA, 22 nt, Artificial Sequence
  SAMD9 targeting guide sequence portion
acgcguacuccacaguaguucc

SEQ ID NO: 2718 - RNA, 22 nt, Artificial Sequence
  SAMD9 targeting guide sequence portion
acgcgucauucacucuuugauu

SEQ ID NO: 2719 - RNA, 22 nt, Artificial Sequence
  SAMD9 targeting guide sequence portion
acuacuguggaguacgcgucau

SEQ ID NO: 2720 - RNA, 22 nt, Artificial Sequence
  SAMD9 targeting guide sequence portion
acuguggaguacgcgucauuca

SEQ ID NO: 2721 - RNA, 22 nt, Artificial Sequence
  SAMD9 targeting guide sequence portion
agagugaaugacgcguacucca

SEQ ID NO: 2722 - RNA, 22 nt, Artificial Sequence
  SAMD9 targeting guide sequence portion
aguacgcgucauucacucuuug

SEQ ID NO: 2723 - RNA, 22 nt, Artificial Sequence
  SAMD9 targeting guide sequence portion
agugaaugacgcguacuccaca

SEQ ID NO: 2724 - RNA, 22 nt, Artificial Sequence
  SAMD9 targeting guide sequence portion
aucaaagagugaaugacgcgua

SEQ ID NO: 2725 - RNA, 22 nt, Artificial Sequence
  SAMD9 targeting guide sequence portion
augacgcguacuccacaguagu

SEQ ID NO: 2726 - RNA, 22 nt, Artificial Sequence
  SAMD9 targeting guide sequence portion
caaagagugaaugacgcguacu

SEQ ID NO: 2727 - RNA, 22 nt, Artificial Sequence
  SAMD9 targeting guide sequence portion
caaucaaagagugaaugacgcg

SEQ ID NO: 2728 - RNA, 22 nt, Artificial Sequence
  SAMD9 targeting guide sequence portion
cgcguacuccacaguaguuccc

SEQ ID NO: 2729 - RNA, 22 nt, Artificial Sequence
  SAMD9 targeting guide sequence portion
cgcgucauucacucuuugauug

SEQ ID NO: 2730 - RNA, 22 nt, Artificial Sequence
  SAMD9 targeting guide sequence portion
cgucauucacucuuugauugca

SEQ ID NO: 2731 - RNA, 22 nt, Artificial Sequence
  SAMD9 targeting guide sequence portion
cuacuguggaguacgcgucauu

SEQ ID NO: 2732 - RNA, 22 nt, Artificial Sequence
  SAMD9 targeting guide sequence portion
cugcaaucaaagagugaaugac

SEQ ID NO: 2733 - RNA, 22 nt, Artificial Sequence
  SAMD9 targeting guide sequence portion
cuguggaguacgcgucauucac

SEQ ID NO: 2734 - RNA, 22 nt, Artificial Sequence
  SAMD9 targeting guide sequence portion
gaacuacuguggaguacgcguc

SEQ ID NO: 2735 - RNA, 22 nt, Artificial Sequence
  SAMD9 targeting guide sequence portion
gaaugacgcguacuccacagua

SEQ ID NO: 2736 - RNA, 22 nt, Artificial Sequence
  SAMD9 targeting guide sequence portion
gaaugugggaacuacuguggag

SEQ ID NO: 2737 - RNA, 22 nt, Artificial Sequence
  SAMD9 targeting guide sequence portion
gacgcguacuccacaguaguuc

SEQ ID NO: 2738 - RNA, 22 nt, Artificial Sequence
  SAMD9 targeting guide sequence portion
gaguacgcgucauucacucuuu

SEQ ID NO: 2739 - RNA, 22 nt, Artificial Sequence
  SAMD9 targeting guide sequence portion
gagugaaugacgcguacuccac

SEQ ID NO: 2740 - RNA, 22 nt, Artificial Sequence
  SAMD9 targeting guide sequence portion
gcaaucaaagagugaaugacgc

SEQ ID NO: 2741 - RNA, 22 nt, Artificial Sequence
  SAMD9 targeting guide sequence portion
gcgucauucacucuuugauugc

SEQ ID NO: 2742 - RNA, 22 nt, Artificial Sequence
  SAMD9 targeting guide sequence portion
ggaacuacuguggaguacgcgu

SEQ ID NO: 2743 - RNA, 22 nt, Artificial Sequence
  SAMD9 targeting guide sequence portion
ggaguacgcgucauucacucuu

SEQ ID NO: 2744 - RNA, 22 nt, Artificial Sequence
  SAMD9 targeting guide sequence portion
gggaacuacuguggaguacgcg

SEQ ID NO: 2745 - RNA, 22 nt, Artificial Sequence
  SAMD9 targeting guide sequence portion
guacgcgucauucacucuuuga

SEQ ID NO: 2746 - RNA, 22 nt, Artificial Sequence
  SAMD9 targeting guide sequence portion
gucauucacucuuugauugcag

SEQ ID NO: 2747 - RNA, 22 nt, Artificial Sequence
  SAMD9 targeting guide sequence portion
gugaaugacgcguacuccacag

SEQ ID NO: 2748 - RNA, 22 nt, Artificial Sequence
  SAMD9 targeting guide sequence portion
guggaguacgcgucauucacuc

SEQ ID NO: 2749 - RNA, 22 nt, Artificial Sequence
  SAMD9 targeting guide sequence portion
uacgcgucauucacucuuugau

SEQ ID NO: 2750 - RNA, 22 nt, Artificial Sequence
  SAMD9 targeting guide sequence portion
uacuguggaguacgcgucauuc

SEQ ID NO: 2751 - RNA, 22 nt, Artificial Sequence
  SAMD9 targeting guide sequence portion
ucaaagagugaaugacgcguac

SEQ ID NO: 2752 - RNA, 22 nt, Artificial Sequence
  SAMD9 targeting guide sequence portion
ucugcaaucaaagagugaauga

SEQ ID NO: 2753 - RNA, 22 nt, Artificial Sequence
  SAMD9 targeting guide sequence portion
ugaaugacgcguacuccacagu

SEQ ID NO: 2754 - RNA, 22 nt, Artificial Sequence
  SAMD9 targeting guide sequence portion
ugacgcguacuccacaguaguu

SEQ ID NO: 2755 - RNA, 22 nt, Artificial Sequence
  SAMD9 targeting guide sequence portion
ugcaaucaaagagugaaugacg

SEQ ID NO: 2756 - RNA, 22 nt, Artificial Sequence
  SAMD9 targeting guide sequence portion
uggaguacgcgucauucacucu

SEQ ID NO: 2757 - RNA, 22 nt, Artificial Sequence
  SAMD9 targeting guide sequence portion
uguggaguacgcgucauucacu

SEQ ID NO: 2758 - RNA, 20 nt, Artificial Sequence
  SAMD9 targeting guide sequence portion
aaagagugaaugauguguac

SEQ ID NO: 2759 - RNA, 20 nt, Artificial Sequence
  SAMD9 targeting guide sequence portion
aacuacuguggaguacacau

SEQ ID NO: 2760 - RNA, 20 nt, Artificial Sequence
  SAMD9 targeting guide sequence portion
aagagugaaugauguguacu

SEQ ID NO: 2761 - RNA, 20 nt, Artificial Sequence
  SAMD9 targeting guide sequence portion
aaucaaagagugaaugaugu

SEQ ID NO: 2762 - RNA, 20 nt, Artificial Sequence
  SAMD9 targeting guide sequence portion
aaugauguguacuccacagu

SEQ ID NO: 2763 - RNA, 20 nt, Artificial Sequence
  SAMD9 targeting guide sequence portion
aaugugggaacuacugugga

SEQ ID NO: 2764 - RNA, 20 nt, Artificial Sequence
  SAMD9 targeting guide sequence portion
acacaucauucacucuuuga

SEQ ID NO: 2765 - RNA, 20 nt, Artificial Sequence
  SAMD9 targeting guide sequence portion
acaucauucacucuuugauu

SEQ ID NO: 2766 - RNA, 20 nt, Artificial Sequence
  SAMD9 targeting guide sequence portion
acuacuguggaguacacauc

SEQ ID NO: 2767 - RNA, 20 nt, Artificial Sequence
  SAMD9 targeting guide sequence portion
acuguggaguacacaucauu

SEQ ID NO: 2768 - RNA, 20 nt, Artificial Sequence
  SAMD9 targeting guide sequence portion
agagugaaugauguguacuc

SEQ ID NO: 2769 - RNA, 20 nt, Artificial Sequence
  SAMD9 targeting guide sequence portion
aguacacaucauucacucuu

SEQ ID NO: 2770 - RNA, 20 nt, Artificial Sequence
  SAMD9 targeting guide sequence portion
agugaaugauguguacucca

SEQ ID NO: 2771 - RNA, 20 nt, Artificial Sequence
  SAMD9 targeting guide sequence portion
aucaaagagugaaugaugug

SEQ ID NO: 2772 - RNA, 20 nt, Artificial Sequence
  SAMD9 targeting guide sequence portion
augauguguacuccacagua

SEQ ID NO: 2773 - RNA, 20 nt, Artificial Sequence
  SAMD9 targeting guide sequence portion
auguguacuccacaguaguu

SEQ ID NO: 2774 - RNA, 20 nt, Artificial Sequence
  SAMD9 targeting guide sequence portion
caaagagugaaugaugugua

SEQ ID NO: 2775 - RNA, 20 nt, Artificial Sequence
  SAMD9 targeting guide sequence portion
caaucaaagagugaaugaug

SEQ ID NO: 2776 - RNA, 20 nt, Artificial Sequence
  SAMD9 targeting guide sequence portion
cacaucauucacucuuugau

SEQ ID NO: 2777 - RNA, 20 nt, Artificial Sequence
  SAMD9 targeting guide sequence portion
cuacuguggaguacacauca

SEQ ID NO: 2778 - RNA, 20 nt, Artificial Sequence
  SAMD9 targeting guide sequence portion
cuguggaguacacaucauuc

SEQ ID NO: 2779 - RNA, 20 nt, Artificial Sequence
  SAMD9 targeting guide sequence portion
gaacuacuguggaguacaca

SEQ ID NO: 2780 - RNA, 20 nt, Artificial Sequence
  SAMD9 targeting guide sequence portion
gaaugauguguacuccacag

SEQ ID NO: 2781 - RNA, 20 nt, Artificial Sequence
  SAMD9 targeting guide sequence portion
gaaugugggaacuacugugg

SEQ ID NO: 2782 - RNA, 20 nt, Artificial Sequence
  SAMD9 targeting guide sequence portion
gaguacacaucauucacucu

SEQ ID NO: 2783 - RNA, 20 nt, Artificial Sequence
  SAMD9 targeting guide sequence portion
gagugaaugauguguacucc

SEQ ID NO: 2784 - RNA, 20 nt, Artificial Sequence
  SAMD9 targeting guide sequence portion
gauguguacuccacaguagu

SEQ ID NO: 2785 - RNA, 20 nt, Artificial Sequence
  SAMD9 targeting guide sequence portion
gcaaucaaagagugaaugau

SEQ ID NO: 2786 - RNA, 20 nt, Artificial Sequence
  SAMD9 targeting guide sequence portion
ggaacuacuguggaguacac

SEQ ID NO: 2787 - RNA, 20 nt, Artificial Sequence
  SAMD9 targeting guide sequence portion
ggaguacacaucauucacuc

SEQ ID NO: 2788 - RNA, 20 nt, Artificial Sequence
  SAMD9 targeting guide sequence portion
gggaacuacuguggaguaca

SEQ ID NO: 2789 - RNA, 20 nt, Artificial Sequence
  SAMD9 targeting guide sequence portion
guacacaucauucacucuuu

SEQ ID NO: 2790 - RNA, 20 nt, Artificial Sequence
  SAMD9 targeting guide sequence portion
gugaaugauguguacuccac

SEQ ID NO: 2791 - RNA, 20 nt, Artificial Sequence
  SAMD9 targeting guide sequence portion
guggaguacacaucauucac

SEQ ID NO: 2792 - RNA, 20 nt, Artificial Sequence
  SAMD9 targeting guide sequence portion
guguacuccacaguaguucc

SEQ ID NO: 2793 - RNA, 20 nt, Artificial Sequence
  SAMD9 targeting guide sequence portion
uacacaucauucacucuuug

SEQ ID NO: 2794 - RNA, 20 nt, Artificial Sequence
  SAMD9 targeting guide sequence portion
uacuguggaguacacaucau

SEQ ID NO: 2795 - RNA, 20 nt, Artificial Sequence
  SAMD9 targeting guide sequence portion
ucaaagagugaaugaugugu

SEQ ID NO: 2796 - RNA, 20 nt, Artificial Sequence
  SAMD9 targeting guide sequence portion
ugaaugauguguacuccaca

SEQ ID NO: 2797 - RNA, 20 nt, Artificial Sequence
  SAMD9 targeting guide sequence portion
ugauguguacuccacaguag

SEQ ID NO: 2798 - RNA, 20 nt, Artificial Sequence
  SAMD9 targeting guide sequence portion
uggaguacacaucauucacu

SEQ ID NO: 2799 - RNA, 20 nt, Artificial Sequence
  SAMD9 targeting guide sequence portion
uguacuccacaguaguuccc

SEQ ID NO: 2800 - RNA, 20 nt, Artificial Sequence
  SAMD9 targeting guide sequence portion
uguggaguacacaucauuca

SEQ ID NO: 2801 - RNA, 20 nt, Artificial Sequence
  SAMD9 targeting guide sequence portion
uguguacuccacaguaguuc

SEQ ID NO: 2802 - RNA, 21 nt, Artificial Sequence
  SAMD9 targeting guide sequence portion
aaagagugaaugauguguacu

SEQ ID NO: 2803 - RNA, 21 nt, Artificial Sequence
  SAMD9 targeting guide sequence portion
aacuacuguggaguacacauc

SEQ ID NO: 2804 - RNA, 21 nt, Artificial Sequence
  SAMD9 targeting guide sequence portion
aagagugaaugauguguacuc

SEQ ID NO: 2805 - RNA, 21 nt, Artificial Sequence
  SAMD9 targeting guide sequence portion
aaucaaagagugaaugaugug

SEQ ID NO: 2806 - RNA, 21 nt, Artificial Sequence
  SAMD9 targeting guide sequence portion
aaugauguguacuccacagua

SEQ ID NO: 2807 - RNA, 21 nt, Artificial Sequence
  SAMD9 targeting guide sequence portion
acacaucauucacucuuugau

SEQ ID NO: 2808 - RNA, 21 nt, Artificial Sequence
  SAMD9 targeting guide sequence portion
acaucauucacucuuugauug

SEQ ID NO: 2809 - RNA, 21 nt, Artificial Sequence
  SAMD9 targeting guide sequence portion
acuacuguggaguacacauca

SEQ ID NO: 2810 - RNA, 21 nt, Artificial Sequence
  SAMD9 targeting guide sequence portion
acuguggaguacacaucauuc

SEQ ID NO: 2811 - RNA, 21 nt, Artificial Sequence
  SAMD9 targeting guide sequence portion
agagugaaugauguguacucc

SEQ ID NO: 2812 - RNA, 21 nt, Artificial Sequence
  SAMD9 targeting guide sequence portion
aguacacaucauucacucuuu

SEQ ID NO: 2813 - RNA, 21 nt, Artificial Sequence
  SAMD9 targeting guide sequence portion
agugaaugauguguacuccac

SEQ ID NO: 2814 - RNA, 21 nt, Artificial Sequence
  SAMD9 targeting guide sequence portion
aucaaagagugaaugaugugu

SEQ ID NO: 2815 - RNA, 21 nt, Artificial Sequence
  SAMD9 targeting guide sequence portion
augauguguacuccacaguag

SEQ ID NO: 2816 - RNA, 21 nt, Artificial Sequence
  SAMD9 targeting guide sequence portion
auguguacuccacaguaguuc

SEQ ID NO: 2817 - RNA, 21 nt, Artificial Sequence
  SAMD9 targeting guide sequence portion
caaagagugaaugauguguac

SEQ ID NO: 2818 - RNA, 21 nt, Artificial Sequence
  SAMD9 targeting guide sequence portion
caaucaaagagugaaugaugu

SEQ ID NO: 2819 - RNA, 21 nt, Artificial Sequence
  SAMD9 targeting guide sequence portion
cacaucauucacucuuugauu

SEQ ID NO: 2820 - RNA, 21 nt, Artificial Sequence
  SAMD9 targeting guide sequence portion
cgaaugugggaacuacugugg

SEQ ID NO: 2821 - RNA, 21 nt, Artificial Sequence
  SAMD9 targeting guide sequence portion
cuacuguggaguacacaucau

SEQ ID NO: 2822 - RNA, 21 nt, Artificial Sequence
  SAMD9 targeting guide sequence portion
cuguggaguacacaucauuca

SEQ ID NO: 2823 - RNA, 21 nt, Artificial Sequence
  SAMD9 targeting guide sequence portion
gaacuacuguggaguacacau

SEQ ID NO: 2824 - RNA, 21 nt, Artificial Sequence
  SAMD9 targeting guide sequence portion
gaaugauguguacuccacagu

SEQ ID NO: 2825 - RNA, 21 nt, Artificial Sequence
  SAMD9 targeting guide sequence portion
gaaugugggaacuacugugga

SEQ ID NO: 2826 - RNA, 21 nt, Artificial Sequence
  SAMD9 targeting guide sequence portion
gaguacacaucauucacucuu

SEQ ID NO: 2827 - RNA, 21 nt, Artificial Sequence
  SAMD9 targeting guide sequence portion
gagugaaugauguguacucca

SEQ ID NO: 2828 - RNA, 21 nt, Artificial Sequence
  SAMD9 targeting guide sequence portion
gauguguacuccacaguaguu

SEQ ID NO: 2829 - RNA, 21 nt, Artificial Sequence
  SAMD9 targeting guide sequence portion
gcaaucaaagagugaaugaug

SEQ ID NO: 2830 - RNA, 21 nt, Artificial Sequence
  SAMD9 targeting guide sequence portion
ggaacuacuguggaguacaca

SEQ ID NO: 2831 - RNA, 21 nt, Artificial Sequence
  SAMD9 targeting guide sequence portion
ggaguacacaucauucacucu

SEQ ID NO: 2832 - RNA, 21 nt, Artificial Sequence
  SAMD9 targeting guide sequence portion
gggaacuacuguggaguacac

SEQ ID NO: 2833 - RNA, 21 nt, Artificial Sequence
  SAMD9 targeting guide sequence portion
guacacaucauucacucuuug

SEQ ID NO: 2834 - RNA, 21 nt, Artificial Sequence
  SAMD9 targeting guide sequence portion
gugaaugauguguacuccaca

SEQ ID NO: 2835 - RNA, 21 nt, Artificial Sequence
  SAMD9 targeting guide sequence portion
guggaguacacaucauucacu

SEQ ID NO: 2836 - RNA, 21 nt, Artificial Sequence
  SAMD9 targeting guide sequence portion
guguacuccacaguaguuccc

SEQ ID NO: 2837 - RNA, 21 nt, Artificial Sequence
  SAMD9 targeting guide sequence portion
uacacaucauucacucuuuga

SEQ ID NO: 2838 - RNA, 21 nt, Artificial Sequence
  SAMD9 targeting guide sequence portion
uacuguggaguacacaucauu

SEQ ID NO: 2839 - RNA, 21 nt, Artificial Sequence
  SAMD9 targeting guide sequence portion
ucaaagagugaaugaugugua

SEQ ID NO: 2840 - RNA, 21 nt, Artificial Sequence
  SAMD9 targeting guide sequence portion
ugaaugauguguacuccacag

SEQ ID NO: 2841 - RNA, 21 nt, Artificial Sequence
  SAMD9 targeting guide sequence portion
ugauguguacuccacaguagu

SEQ ID NO: 2842 - RNA, 21 nt, Artificial Sequence
  SAMD9 targeting guide sequence portion
ugcaaucaaagagugaaugau

SEQ ID NO: 2843 - RNA, 21 nt, Artificial Sequence
  SAMD9 targeting guide sequence portion
uggaguacacaucauucacuc

SEQ ID NO: 2844 - RNA, 21 nt, Artificial Sequence
  SAMD9 targeting guide sequence portion
ugggaacuacuguggaguaca

SEQ ID NO: 2845 - RNA, 21 nt, Artificial Sequence
  SAMD9 targeting guide sequence portion
uguacuccacaguaguuccca

SEQ ID NO: 2846 - RNA, 21 nt, Artificial Sequence
  SAMD9 targeting guide sequence portion
uguggaguacacaucauucac

SEQ ID NO: 2847 - RNA, 21 nt, Artificial Sequence
  SAMD9 targeting guide sequence portion
uguguacuccacaguaguucc

SEQ ID NO: 2848 - RNA, 22 nt, Artificial Sequence
  SAMD9 targeting guide sequence portion
aaagagugaaugauguguacuc

SEQ ID NO: 2849 - RNA, 22 nt, Artificial Sequence
  SAMD9 targeting guide sequence portion
aacuacuguggaguacacauca

SEQ ID NO: 2850 - RNA, 22 nt, Artificial Sequence
  SAMD9 targeting guide sequence portion
aagagugaaugauguguacucc

SEQ ID NO: 2851 - RNA, 22 nt, Artificial Sequence
  SAMD9 targeting guide sequence portion
aaucaaagagugaaugaugugu

SEQ ID NO: 2852 - RNA, 22 nt, Artificial Sequence
  SAMD9 targeting guide sequence portion
aaugauguguacuccacaguag

SEQ ID NO: 2853 - RNA, 22 nt, Artificial Sequence
  SAMD9 targeting guide sequence portion
acacaucauucacucuuugauu

SEQ ID NO: 2854 - RNA, 22 nt, Artificial Sequence
  SAMD9 targeting guide sequence portion
acaucauucacucuuugauugc

SEQ ID NO: 2855 - RNA, 22 nt, Artificial Sequence
  SAMD9 targeting guide sequence portion
acuacuguggaguacacaucau

SEQ ID NO: 2856 - RNA, 22 nt, Artificial Sequence
  SAMD9 targeting guide sequence portion
acuguggaguacacaucauuca

SEQ ID NO: 2857 - RNA, 22 nt, Artificial Sequence
  SAMD9 targeting guide sequence portion
agagugaaugauguguacucca

SEQ ID NO: 2858 - RNA, 22 nt, Artificial Sequence
  SAMD9 targeting guide sequence portion
aguacacaucauucacucuuug

SEQ ID NO: 2859 - RNA, 22 nt, Artificial Sequence
  SAMD9 targeting guide sequence portion
agugaaugauguguacuccaca

SEQ ID NO: 2860 - RNA, 22 nt, Artificial Sequence
  SAMD9 targeting guide sequence portion
aucaaagagugaaugaugugua

SEQ ID NO: 2861 - RNA, 22 nt, Artificial Sequence
  SAMD9 targeting guide sequence portion
augauguguacuccacaguagu

SEQ ID NO: 2862 - RNA, 22 nt, Artificial Sequence
  SAMD9 targeting guide sequence portion
auguguacuccacaguaguucc

SEQ ID NO: 2863 - RNA, 22 nt, Artificial Sequence
  SAMD9 targeting guide sequence portion
caaagagugaaugauguguacu

SEQ ID NO: 2864 - RNA, 22 nt, Artificial Sequence
  SAMD9 targeting guide sequence portion
caaucaaagagugaaugaugug

SEQ ID NO: 2865 - RNA, 22 nt, Artificial Sequence
  SAMD9 targeting guide sequence portion
cacaucauucacucuuugauug

SEQ ID NO: 2866 - RNA, 22 nt, Artificial Sequence
  SAMD9 targeting guide sequence portion
cgaaugugggaacuacugugga

SEQ ID NO: 2867 - RNA, 22 nt, Artificial Sequence
  SAMD9 targeting guide sequence portion
cuacuguggaguacacaucauu

SEQ ID NO: 2868 - RNA, 22 nt, Artificial Sequence
  SAMD9 targeting guide sequence portion
cugcaaucaaagagugaaugau

SEQ ID NO: 2869 - RNA, 22 nt, Artificial Sequence
  SAMD9 targeting guide sequence portion
cuguggaguacacaucauucac

SEQ ID NO: 2870 - RNA, 22 nt, Artificial Sequence
  SAMD9 targeting guide sequence portion
gaacuacuguggaguacacauc

SEQ ID NO: 2871 - RNA, 22 nt, Artificial Sequence
  SAMD9 targeting guide sequence portion
gaaugauguguacuccacagua

SEQ ID NO: 2872 - RNA, 22 nt, Artificial Sequence
  SAMD9 targeting guide sequence portion
gaguacacaucauucacucuuu

SEQ ID NO: 2873 - RNA, 22 nt, Artificial Sequence
  SAMD9 targeting guide sequence portion
gagugaaugauguguacuccac

SEQ ID NO: 2874 - RNA, 22 nt, Artificial Sequence
  SAMD9 targeting guide sequence portion
gauguguacuccacaguaguuc

SEQ ID NO: 2875 - RNA, 22 nt, Artificial Sequence
  SAMD9 targeting guide sequence portion
gcaaucaaagagugaaugaugu

SEQ ID NO: 2876 - RNA, 22 nt, Artificial Sequence
  SAMD9 targeting guide sequence portion
ggaacuacuguggaguacacau

SEQ ID NO: 2877 - RNA, 22 nt, Artificial Sequence
  SAMD9 targeting guide sequence portion
ggaguacacaucauucacucuu

SEQ ID NO: 2878 - RNA, 22 nt, Artificial Sequence
  SAMD9 targeting guide sequence portion
gggaacuacuguggaguacaca

SEQ ID NO: 2879 - RNA, 22 nt, Artificial Sequence
  SAMD9 targeting guide sequence portion
guacacaucauucacucuuuga

SEQ ID NO: 2880 - RNA, 22 nt, Artificial Sequence
  SAMD9 targeting guide sequence portion
gugaaugauguguacuccacag

SEQ ID NO: 2881 - RNA, 22 nt, Artificial Sequence
  SAMD9 targeting guide sequence portion
guggaguacacaucauucacuc

SEQ ID NO: 2882 - RNA, 22 nt, Artificial Sequence
  SAMD9 targeting guide sequence portion
gugggaacuacuguggaguaca

SEQ ID NO: 2883 - RNA, 22 nt, Artificial Sequence
  SAMD9 targeting guide sequence portion
guguacuccacaguaguuccca

SEQ ID NO: 2884 - RNA, 22 nt, Artificial Sequence
  SAMD9 targeting guide sequence portion
uacacaucauucacucuuugau

SEQ ID NO: 2885 - RNA, 22 nt, Artificial Sequence
  SAMD9 targeting guide sequence portion
uacuguggaguacacaucauuc

SEQ ID NO: 2886 - RNA, 22 nt, Artificial Sequence
  SAMD9 targeting guide sequence portion
ucaaagagugaaugauguguac

SEQ ID NO: 2887 - RNA, 22 nt, Artificial Sequence
  SAMD9 targeting guide sequence portion
ucgaaugugggaacuacugugg

SEQ ID NO: 2888 - RNA, 22 nt, Artificial Sequence
  SAMD9 targeting guide sequence portion
ugaaugauguguacuccacagu

SEQ ID NO: 2889 - RNA, 22 nt, Artificial Sequence
  SAMD9 targeting guide sequence portion
ugauguguacuccacaguaguu

SEQ ID NO: 2890 - RNA, 22 nt, Artificial Sequence
  SAMD9 targeting guide sequence portion
ugcaaucaaagagugaaugaug

SEQ ID NO: 2891 - RNA, 22 nt, Artificial Sequence
  SAMD9 targeting guide sequence portion
uggaguacacaucauucacucu

SEQ ID NO: 2892 - RNA, 22 nt, Artificial Sequence
  SAMD9 targeting guide sequence portion
ugggaacuacuguggaguacac

SEQ ID NO: 2893 - RNA, 22 nt, Artificial Sequence
  SAMD9 targeting guide sequence portion
uguacuccacaguaguucccac

SEQ ID NO: 2894 - RNA, 22 nt, Artificial Sequence
  SAMD9 targeting guide sequence portion
uguggaguacacaucauucacu

SEQ ID NO: 2895 - RNA, 22 nt, Artificial Sequence
  SAMD9 targeting guide sequence portion
uguguacuccacaguaguuccc

SEQ ID NO: 2896 - RNA, 20 nt, Artificial Sequence
  SAMD9 targeting guide sequence portion
aaaaacagaggucaucaaau

SEQ ID NO: 2897 - RNA, 20 nt, Artificial Sequence
  SAMD9 targeting guide sequence portion
aaaacagaggucaucaaaug

SEQ ID NO: 2898 - RNA, 20 nt, Artificial Sequence
  SAMD9 targeting guide sequence portion
aaacagaggucaucaaaugu

SEQ ID NO: 2899 - RNA, 20 nt, Artificial Sequence
  SAMD9 targeting guide sequence portion
aaaugugggaacuacugugg

SEQ ID NO: 2900 - RNA, 20 nt, Artificial Sequence
  SAMD9 targeting guide sequence portion
aacagaggucaucaaaugug

SEQ ID NO: 2901 - RNA, 20 nt, Artificial Sequence
  SAMD9 targeting guide sequence portion
aauucugauaaaaacagagg

SEQ ID NO: 2902 - RNA, 20 nt, Artificial Sequence
  SAMD9 targeting guide sequence portion
acagaggucaucaaaugugg

SEQ ID NO: 2903 - RNA, 20 nt, Artificial Sequence
  SAMD9 targeting guide sequence portion
acaguaguucccacauuuga

SEQ ID NO: 2904 - RNA, 20 nt, Artificial Sequence
  SAMD9 targeting guide sequence portion
acauuugaugaccucuguuu

SEQ ID NO: 2905 - RNA, 20 nt, Artificial Sequence
  SAMD9 targeting guide sequence portion
acuccacaguaguucccaca

SEQ ID NO: 2906 - RNA, 20 nt, Artificial Sequence
  SAMD9 targeting guide sequence portion
agaggucaucaaauguggga

SEQ ID NO: 2907 - RNA, 20 nt, Artificial Sequence
  SAMD9 targeting guide sequence portion
aggucaucaaaugugggaac

SEQ ID NO: 2908 - RNA, 20 nt, Artificial Sequence
  SAMD9 targeting guide sequence portion
aguaguucccacauuugaug

SEQ ID NO: 2909 - RNA, 20 nt, Artificial Sequence
  SAMD9 targeting guide sequence portion
aguucccacauuugaugacc

SEQ ID NO: 2910 - RNA, 20 nt, Artificial Sequence
  SAMD9 targeting guide sequence portion
auaaaaacagaggucaucaa

SEQ ID NO: 2911 - RNA, 20 nt, Artificial Sequence
  SAMD9 targeting guide sequence portion
aucaaaugugggaacuacug

SEQ ID NO: 2912 - RNA, 20 nt, Artificial Sequence
  SAMD9 targeting guide sequence portion
auucugauaaaaacagaggu

SEQ ID NO: 2913 - RNA, 20 nt, Artificial Sequence
  SAMD9 targeting guide sequence portion
auuugaugaccucuguuuuu

SEQ ID NO: 2914 - RNA, 20 nt, Artificial Sequence
  SAMD9 targeting guide sequence portion
caaaugugggaacuacugug

SEQ ID NO: 2915 - RNA, 20 nt, Artificial Sequence
  SAMD9 targeting guide sequence portion
cacaguaguucccacauuug

SEQ ID NO: 2916 - RNA, 20 nt, Artificial Sequence
  SAMD9 targeting guide sequence portion
cacauuugaugaccucuguu

SEQ ID NO: 2917 - RNA, 20 nt, Artificial Sequence
  SAMD9 targeting guide sequence portion
cagaggucaucaaauguggg

SEQ ID NO: 2918 - RNA, 20 nt, Artificial Sequence
  SAMD9 targeting guide sequence portion
caguaguucccacauuugau

SEQ ID NO: 2919 - RNA, 20 nt, Artificial Sequence
  SAMD9 targeting guide sequence portion
caucaaaugugggaacuacu

SEQ ID NO: 2920 - RNA, 20 nt, Artificial Sequence
  SAMD9 targeting guide sequence portion
cauuugaugaccucuguuuu

SEQ ID NO: 2921 - RNA, 20 nt, Artificial Sequence
  SAMD9 targeting guide sequence portion
ccacaguaguucccacauuu

SEQ ID NO: 2922 - RNA, 20 nt, Artificial Sequence
  SAMD9 targeting guide sequence portion
ccacauuugaugaccucugu

SEQ ID NO: 2923 - RNA, 20 nt, Artificial Sequence
  SAMD9 targeting guide sequence portion
cccacauuugaugaccucug

SEQ ID NO: 2924 - RNA, 20 nt, Artificial Sequence
  SAMD9 targeting guide sequence portion
cguacuccacaguaguuccc

SEQ ID NO: 2925 - RNA, 20 nt, Artificial Sequence
  SAMD9 targeting guide sequence portion
cuccacaguaguucccacau

SEQ ID NO: 2926 - RNA, 20 nt, Artificial Sequence
  SAMD9 targeting guide sequence portion
cugauaaaaacagaggucau

SEQ ID NO: 2927 - RNA, 20 nt, Artificial Sequence
  SAMD9 targeting guide sequence portion
gaggucaucaaaugugggaa

SEQ ID NO: 2928 - RNA, 20 nt, Artificial Sequence
  SAMD9 targeting guide sequence portion
gauaaaaacagaggucauca

SEQ ID NO: 2929 - RNA, 20 nt, Artificial Sequence
  SAMD9 targeting guide sequence portion
ggucaucaaaugugggaacu

SEQ ID NO: 2930 - RNA, 20 nt, Artificial Sequence
  SAMD9 targeting guide sequence portion
guacuccacaguaguuccca

SEQ ID NO: 2931 - RNA, 20 nt, Artificial Sequence
  SAMD9 targeting guide sequence portion
guaguucccacauuugauga

SEQ ID NO: 2932 - RNA, 20 nt, Artificial Sequence
  SAMD9 targeting guide sequence portion
gucaucaaaugugggaacua

SEQ ID NO: 2933 - RNA, 20 nt, Artificial Sequence
  SAMD9 targeting guide sequence portion
guucccacauuugaugaccu

SEQ ID NO: 2934 - RNA, 20 nt, Artificial Sequence
  SAMD9 targeting guide sequence portion
uaaaaacagaggucaucaaa

SEQ ID NO: 2935 - RNA, 20 nt, Artificial Sequence
  SAMD9 targeting guide sequence portion
uacuccacaguaguucccac

SEQ ID NO: 2936 - RNA, 20 nt, Artificial Sequence
  SAMD9 targeting guide sequence portion
uaguucccacauuugaugac

SEQ ID NO: 2937 - RNA, 20 nt, Artificial Sequence
  SAMD9 targeting guide sequence portion
ucaaaugugggaacuacugu

SEQ ID NO: 2938 - RNA, 20 nt, Artificial Sequence
  SAMD9 targeting guide sequence portion
ucaucaaaugugggaacuac

SEQ ID NO: 2939 - RNA, 20 nt, Artificial Sequence
  SAMD9 targeting guide sequence portion
uccacaguaguucccacauu

SEQ ID NO: 2940 - RNA, 20 nt, Artificial Sequence
  SAMD9 targeting guide sequence portion
ucccacauuugaugaccucu

SEQ ID NO: 2941 - RNA, 20 nt, Artificial Sequence
  SAMD9 targeting guide sequence portion
ucugauaaaaacagagguca

SEQ ID NO: 2942 - RNA, 20 nt, Artificial Sequence
  SAMD9 targeting guide sequence portion
ugauaaaaacagaggucauc

SEQ ID NO: 2943 - RNA, 20 nt, Artificial Sequence
  SAMD9 targeting guide sequence portion
ugaugaccucuguuuuuauc

SEQ ID NO: 2944 - RNA, 20 nt, Artificial Sequence
  SAMD9 targeting guide sequence portion
uucccacauuugaugaccuc

SEQ ID NO: 2945 - RNA, 20 nt, Artificial Sequence
  SAMD9 targeting guide sequence portion
uucugauaaaaacagagguc

SEQ ID NO: 2946 - RNA, 20 nt, Artificial Sequence
  SAMD9 targeting guide sequence portion
uugaugaccucuguuuuuau

SEQ ID NO: 2947 - RNA, 20 nt, Artificial Sequence
  SAMD9 targeting guide sequence portion
uuugaugaccucuguuuuua

SEQ ID NO: 2948 - RNA, 21 nt, Artificial Sequence
  SAMD9 targeting guide sequence portion
aaaaacagaggucaucaaaug

SEQ ID NO: 2949 - RNA, 21 nt, Artificial Sequence
  SAMD9 targeting guide sequence portion
aaaacagaggucaucaaaugu

SEQ ID NO: 2950 - RNA, 21 nt, Artificial Sequence
  SAMD9 targeting guide sequence portion
aaacagaggucaucaaaugug

SEQ ID NO: 2951 - RNA, 21 nt, Artificial Sequence
  SAMD9 targeting guide sequence portion
aaaugugggaacuacugugga

SEQ ID NO: 2952 - RNA, 21 nt, Artificial Sequence
  SAMD9 targeting guide sequence portion
aacagaggucaucaaaugugg

SEQ ID NO: 2953 - RNA, 21 nt, Artificial Sequence
  SAMD9 targeting guide sequence portion
aauucugauaaaaacagaggu

SEQ ID NO: 2954 - RNA, 21 nt, Artificial Sequence
  SAMD9 targeting guide sequence portion
acagaggucaucaaauguggg

SEQ ID NO: 2955 - RNA, 21 nt, Artificial Sequence
  SAMD9 targeting guide sequence portion
acaguaguucccacauuugau

SEQ ID NO: 2956 - RNA, 21 nt, Artificial Sequence
  SAMD9 targeting guide sequence portion
acauuugaugaccucuguuuu

SEQ ID NO: 2957 - RNA, 21 nt, Artificial Sequence
  SAMD9 targeting guide sequence portion
acuccacaguaguucccacau

SEQ ID NO: 2958 - RNA, 21 nt, Artificial Sequence
  SAMD9 targeting guide sequence portion
agaggucaucaaaugugggaa

SEQ ID NO: 2959 - RNA, 21 nt, Artificial Sequence
  SAMD9 targeting guide sequence portion
aggucaucaaaugugggaacu

SEQ ID NO: 2960 - RNA, 21 nt, Artificial Sequence
  SAMD9 targeting guide sequence portion
aguaguucccacauuugauga

SEQ ID NO: 2961 - RNA, 21 nt, Artificial Sequence
  SAMD9 targeting guide sequence portion
aguucccacauuugaugaccu

SEQ ID NO: 2962 - RNA, 21 nt, Artificial Sequence
  SAMD9 targeting guide sequence portion
auaaaaacagaggucaucaaa

SEQ ID NO: 2963 - RNA, 21 nt, Artificial Sequence
  SAMD9 targeting guide sequence portion
aucaaaugugggaacuacugu

SEQ ID NO: 2964 - RNA, 21 nt, Artificial Sequence
  SAMD9 targeting guide sequence portion
auucugauaaaaacagagguc

SEQ ID NO: 2965 - RNA, 21 nt, Artificial Sequence
  SAMD9 targeting guide sequence portion
auuugaugaccucuguuuuua

SEQ ID NO: 2966 - RNA, 21 nt, Artificial Sequence
  SAMD9 targeting guide sequence portion
caaaugugggaacuacugugg

SEQ ID NO: 2967 - RNA, 21 nt, Artificial Sequence
  SAMD9 targeting guide sequence portion
caauucugauaaaaacagagg

SEQ ID NO: 2968 - RNA, 21 nt, Artificial Sequence
  SAMD9 targeting guide sequence portion
cacaguaguucccacauuuga

SEQ ID NO: 2969 - RNA, 21 nt, Artificial Sequence
  SAMD9 targeting guide sequence portion
cacauuugaugaccucuguuu

SEQ ID NO: 2970 - RNA, 21 nt, Artificial Sequence
  SAMD9 targeting guide sequence portion
cagaggucaucaaauguggga

SEQ ID NO: 2971 - RNA, 21 nt, Artificial Sequence
  SAMD9 targeting guide sequence portion
caguaguucccacauuugaug

SEQ ID NO: 2972 - RNA, 21 nt, Artificial Sequence
  SAMD9 targeting guide sequence portion
caucaaaugugggaacuacug

SEQ ID NO: 2973 - RNA, 21 nt, Artificial Sequence
  SAMD9 targeting guide sequence portion
cauuugaugaccucuguuuuu

SEQ ID NO: 2974 - RNA, 21 nt, Artificial Sequence
  SAMD9 targeting guide sequence portion
ccacaguaguucccacauuug

SEQ ID NO: 2975 - RNA, 21 nt, Artificial Sequence
  SAMD9 targeting guide sequence portion
ccacauuugaugaccucuguu

SEQ ID NO: 2976 - RNA, 21 nt, Artificial Sequence
  SAMD9 targeting guide sequence portion
cccacauuugaugaccucugu

SEQ ID NO: 2977 - RNA, 21 nt, Artificial Sequence
  SAMD9 targeting guide sequence portion
cguacuccacaguaguuccca

SEQ ID NO: 2978 - RNA, 21 nt, Artificial Sequence
  SAMD9 targeting guide sequence portion
cuccacaguaguucccacauu

SEQ ID NO: 2979 - RNA, 21 nt, Artificial Sequence
  SAMD9 targeting guide sequence portion
cugauaaaaacagaggucauc

SEQ ID NO: 2980 - RNA, 21 nt, Artificial Sequence
  SAMD9 targeting guide sequence portion
gaggucaucaaaugugggaac

SEQ ID NO: 2981 - RNA, 21 nt, Artificial Sequence
  SAMD9 targeting guide sequence portion
gauaaaaacagaggucaucaa

SEQ ID NO: 2982 - RNA, 21 nt, Artificial Sequence
  SAMD9 targeting guide sequence portion
gcguacuccacaguaguuccc

SEQ ID NO: 2983 - RNA, 21 nt, Artificial Sequence
  SAMD9 targeting guide sequence portion
ggucaucaaaugugggaacua

SEQ ID NO: 2984 - RNA, 21 nt, Artificial Sequence
  SAMD9 targeting guide sequence portion
guacuccacaguaguucccac

SEQ ID NO: 2985 - RNA, 21 nt, Artificial Sequence
  SAMD9 targeting guide sequence portion
guaguucccacauuugaugac

SEQ ID NO: 2986 - RNA, 21 nt, Artificial Sequence
  SAMD9 targeting guide sequence portion
gucaucaaaugugggaacuac

SEQ ID NO: 2987 - RNA, 21 nt, Artificial Sequence
  SAMD9 targeting guide sequence portion
guucccacauuugaugaccuc

SEQ ID NO: 2988 - RNA, 21 nt, Artificial Sequence
  SAMD9 targeting guide sequence portion
uaaaaacagaggucaucaaau

SEQ ID NO: 2989 - RNA, 21 nt, Artificial Sequence
  SAMD9 targeting guide sequence portion
uacuccacaguaguucccaca

SEQ ID NO: 2990 - RNA, 21 nt, Artificial Sequence
  SAMD9 targeting guide sequence portion
uaguucccacauuugaugacc

SEQ ID NO: 2991 - RNA, 21 nt, Artificial Sequence
  SAMD9 targeting guide sequence portion
ucaaaugugggaacuacugug

SEQ ID NO: 2992 - RNA, 21 nt, Artificial Sequence
  SAMD9 targeting guide sequence portion
ucaucaaaugugggaacuacu

SEQ ID NO: 2993 - RNA, 21 nt, Artificial Sequence
  SAMD9 targeting guide sequence portion
uccacaguaguucccacauuu

SEQ ID NO: 2994 - RNA, 21 nt, Artificial Sequence
  SAMD9 targeting guide sequence portion
ucccacauuugaugaccucug

SEQ ID NO: 2995 - RNA, 21 nt, Artificial Sequence
  SAMD9 targeting guide sequence portion
ucugauaaaaacagaggucau

SEQ ID NO: 2996 - RNA, 21 nt, Artificial Sequence
  SAMD9 targeting guide sequence portion
ugauaaaaacagaggucauca

SEQ ID NO: 2997 - RNA, 21 nt, Artificial Sequence
  SAMD9 targeting guide sequence portion
ugaugaccucuguuuuuauca

SEQ ID NO: 2998 - RNA, 21 nt, Artificial Sequence
  SAMD9 targeting guide sequence portion
uucccacauuugaugaccucu

SEQ ID NO: 2999 - RNA, 21 nt, Artificial Sequence
  SAMD9 targeting guide sequence portion
uucugauaaaaacagagguca

SEQ ID NO: 3000 - RNA, 21 nt, Artificial Sequence
  SAMD9 targeting guide sequence portion
uugaugaccucuguuuuuauc

SEQ ID NO: 3001 - RNA, 21 nt, Artificial Sequence
  SAMD9 targeting guide sequence portion
uuugaugaccucuguuuuuau

SEQ ID NO: 3002 - RNA, 22 nt, Artificial Sequence
  SAMD9 targeting guide sequence portion
aaaaacagaggucaucaaaugu

SEQ ID NO: 3003 - RNA, 22 nt, Artificial Sequence
  SAMD9 targeting guide sequence portion
aaaacagaggucaucaaaugug

SEQ ID NO: 3004 - RNA, 22 nt, Artificial Sequence
  SAMD9 targeting guide sequence portion
aaacagaggucaucaaaugugg

SEQ ID NO: 3005 - RNA, 22 nt, Artificial Sequence
  SAMD9 targeting guide sequence portion
aaaugugggaacuacuguggag

SEQ ID NO: 3006 - RNA, 22 nt, Artificial Sequence
  SAMD9 targeting guide sequence portion
aacagaggucaucaaauguggg

SEQ ID NO: 3007 - RNA, 22 nt, Artificial Sequence
  SAMD9 targeting guide sequence portion
aauucugauaaaaacagagguc

SEQ ID NO: 3008 - RNA, 22 nt, Artificial Sequence
  SAMD9 targeting guide sequence portion
acaauucugauaaaaacagagg

SEQ ID NO: 3009 - RNA, 22 nt, Artificial Sequence
  SAMD9 targeting guide sequence portion
acagaggucaucaaauguggga

SEQ ID NO: 3010 - RNA, 22 nt, Artificial Sequence
  SAMD9 targeting guide sequence portion
acaguaguucccacauuugaug

SEQ ID NO: 3011 - RNA, 22 nt, Artificial Sequence
  SAMD9 targeting guide sequence portion
acauuugaugaccucuguuuuu

SEQ ID NO: 3012 - RNA, 22 nt, Artificial Sequence
  SAMD9 targeting guide sequence portion
acuccacaguaguucccacauu

SEQ ID NO: 3013 - RNA, 22 nt, Artificial Sequence
  SAMD9 targeting guide sequence portion
agaggucaucaaaugugggaac

SEQ ID NO: 3014 - RNA, 22 nt, Artificial Sequence
  SAMD9 targeting guide sequence portion
aggucaucaaaugugggaacua

SEQ ID NO: 3015 - RNA, 22 nt, Artificial Sequence
  SAMD9 targeting guide sequence portion
aguaguucccacauuugaugac

SEQ ID NO: 3016 - RNA, 22 nt, Artificial Sequence
  SAMD9 targeting guide sequence portion
aguucccacauuugaugaccuc

SEQ ID NO: 3017 - RNA, 22 nt, Artificial Sequence
  SAMD9 targeting guide sequence portion
auaaaaacagaggucaucaaau

SEQ ID NO: 3018 - RNA, 22 nt, Artificial Sequence
  SAMD9 targeting guide sequence portion
aucaaaugugggaacuacugug

SEQ ID NO: 3019 - RNA, 22 nt, Artificial Sequence
  SAMD9 targeting guide sequence portion
auucugauaaaaacagagguca

SEQ ID NO: 3020 - RNA, 22 nt, Artificial Sequence
  SAMD9 targeting guide sequence portion
auuugaugaccucuguuuuuau

SEQ ID NO: 3021 - RNA, 22 nt, Artificial Sequence
  SAMD9 targeting guide sequence portion
caaaugugggaacuacugugga

SEQ ID NO: 3022 - RNA, 22 nt, Artificial Sequence
  SAMD9 targeting guide sequence portion
caauucugauaaaaacagaggu

SEQ ID NO: 3023 - RNA, 22 nt, Artificial Sequence
  SAMD9 targeting guide sequence portion
cacaguaguucccacauuugau

SEQ ID NO: 3024 - RNA, 22 nt, Artificial Sequence
  SAMD9 targeting guide sequence portion
cacauuugaugaccucuguuuu

SEQ ID NO: 3025 - RNA, 22 nt, Artificial Sequence
  SAMD9 targeting guide sequence portion
cagaggucaucaaaugugggaa

SEQ ID NO: 3026 - RNA, 22 nt, Artificial Sequence
  SAMD9 targeting guide sequence portion
caguaguucccacauuugauga

SEQ ID NO: 3027 - RNA, 22 nt, Artificial Sequence
  SAMD9 targeting guide sequence portion
caucaaaugugggaacuacugu

SEQ ID NO: 3028 - RNA, 22 nt, Artificial Sequence
  SAMD9 targeting guide sequence portion
cauuugaugaccucuguuuuua

SEQ ID NO: 3029 - RNA, 22 nt, Artificial Sequence
  SAMD9 targeting guide sequence portion
ccacaguaguucccacauuuga

SEQ ID NO: 3030 - RNA, 22 nt, Artificial Sequence
  SAMD9 targeting guide sequence portion
ccacauuugaugaccucuguuu

SEQ ID NO: 3031 - RNA, 22 nt, Artificial Sequence
  SAMD9 targeting guide sequence portion
cccacauuugaugaccucuguu

SEQ ID NO: 3032 - RNA, 22 nt, Artificial Sequence
  SAMD9 targeting guide sequence portion
cguacuccacaguaguucccac

SEQ ID NO: 3033 - RNA, 22 nt, Artificial Sequence
  SAMD9 targeting guide sequence portion
cuccacaguaguucccacauuu

SEQ ID NO: 3034 - RNA, 22 nt, Artificial Sequence
  SAMD9 targeting guide sequence portion
cugauaaaaacagaggucauca

SEQ ID NO: 3035 - RNA, 22 nt, Artificial Sequence
  SAMD9 targeting guide sequence portion
gaggucaucaaaugugggaacu

SEQ ID NO: 3036 - RNA, 22 nt, Artificial Sequence
  SAMD9 targeting guide sequence portion
gauaaaaacagaggucaucaaa

SEQ ID NO: 3037 - RNA, 22 nt, Artificial Sequence
  SAMD9 targeting guide sequence portion
gcguacuccacaguaguuccca

SEQ ID NO: 3038 - RNA, 22 nt, Artificial Sequence
  SAMD9 targeting guide sequence portion
ggucaucaaaugugggaacuac

SEQ ID NO: 3039 - RNA, 22 nt, Artificial Sequence
  SAMD9 targeting guide sequence portion
guacuccacaguaguucccaca

SEQ ID NO: 3040 - RNA, 22 nt, Artificial Sequence
  SAMD9 targeting guide sequence portion
guaguucccacauuugaugacc

SEQ ID NO: 3041 - RNA, 22 nt, Artificial Sequence
  SAMD9 targeting guide sequence portion
gucaucaaaugugggaacuacu

SEQ ID NO: 3042 - RNA, 22 nt, Artificial Sequence
  SAMD9 targeting guide sequence portion
guucccacauuugaugaccucu

SEQ ID NO: 3043 - RNA, 22 nt, Artificial Sequence
  SAMD9 targeting guide sequence portion
uaaaaacagaggucaucaaaug

SEQ ID NO: 3044 - RNA, 22 nt, Artificial Sequence
  SAMD9 targeting guide sequence portion
uacuccacaguaguucccacau

SEQ ID NO: 3045 - RNA, 22 nt, Artificial Sequence
  SAMD9 targeting guide sequence portion
uaguucccacauuugaugaccu

SEQ ID NO: 3046 - RNA, 22 nt, Artificial Sequence
  SAMD9 targeting guide sequence portion
ucaaaugugggaacuacugugg

SEQ ID NO: 3047 - RNA, 22 nt, Artificial Sequence
  SAMD9 targeting guide sequence portion
ucaucaaaugugggaacuacug

SEQ ID NO: 3048 - RNA, 22 nt, Artificial Sequence
  SAMD9 targeting guide sequence portion
uccacaguaguucccacauuug

SEQ ID NO: 3049 - RNA, 22 nt, Artificial Sequence
  SAMD9 targeting guide sequence portion
ucccacauuugaugaccucugu

SEQ ID NO: 3050 - RNA, 22 nt, Artificial Sequence
  SAMD9 targeting guide sequence portion
ucugauaaaaacagaggucauc

SEQ ID NO: 3051 - RNA, 22 nt, Artificial Sequence
  SAMD9 targeting guide sequence portion
ugauaaaaacagaggucaucaa

SEQ ID NO: 3052 - RNA, 22 nt, Artificial Sequence
  SAMD9 targeting guide sequence portion
ugaugaccucuguuuuuaucag

SEQ ID NO: 3053 - RNA, 22 nt, Artificial Sequence
  SAMD9 targeting guide sequence portion
ugcguacuccacaguaguuccc

SEQ ID NO: 3054 - RNA, 22 nt, Artificial Sequence
  SAMD9 targeting guide sequence portion
uucccacauuugaugaccucug

SEQ ID NO: 3055 - RNA, 22 nt, Artificial Sequence
  SAMD9 targeting guide sequence portion
uucugauaaaaacagaggucau

SEQ ID NO: 3056 - RNA, 22 nt, Artificial Sequence
  SAMD9 targeting guide sequence portion
uugaugaccucuguuuuuauca

SEQ ID NO: 3057 - RNA, 22 nt, Artificial Sequence
  SAMD9 targeting guide sequence portion
uuugaugaccucuguuuuuauc

SEQ ID NO: 3058 - RNA, 20 nt, Artificial Sequence
  SAMD9 targeting guide sequence portion
aaacaagaagucuuucuggg

SEQ ID NO: 3059 - RNA, 20 nt, Artificial Sequence
  SAMD9 targeting guide sequence portion
aaagacuucuuguuuccaau

SEQ ID NO: 3060 - RNA, 20 nt, Artificial Sequence
  SAMD9 targeting guide sequence portion
aaauuuuucugucccccaga

SEQ ID NO: 3061 - RNA, 20 nt, Artificial Sequence
  SAMD9 targeting guide sequence portion
aacaagaagucuuucugggg

SEQ ID NO: 3062 - RNA, 20 nt, Artificial Sequence
  SAMD9 targeting guide sequence portion
aagaagucuuucugggggac

SEQ ID NO: 3063 - RNA, 20 nt, Artificial Sequence
  SAMD9 targeting guide sequence portion
aagacuucuuguuuccaauu

SEQ ID NO: 3064 - RNA, 20 nt, Artificial Sequence
  SAMD9 targeting guide sequence portion
aagucuuucugggggacaga

SEQ ID NO: 3065 - RNA, 20 nt, Artificial Sequence
  SAMD9 targeting guide sequence portion
aauuggaaacaagaagucuu

SEQ ID NO: 3066 - RNA, 20 nt, Artificial Sequence
  SAMD9 targeting guide sequence portion
aauuuuucugucccccagaa

SEQ ID NO: 3067 - RNA, 20 nt, Artificial Sequence
  SAMD9 targeting guide sequence portion
acaagaagucuuucuggggg

SEQ ID NO: 3068 - RNA, 20 nt, Artificial Sequence
  SAMD9 targeting guide sequence portion
acuucuuguuuccaauuccu

SEQ ID NO: 3069 - RNA, 20 nt, Artificial Sequence
  SAMD9 targeting guide sequence portion
agaaagacuucuuguuucca

SEQ ID NO: 3070 - RNA, 20 nt, Artificial Sequence
  SAMD9 targeting guide sequence portion
agaagucuuucugggggaca

SEQ ID NO: 3071 - RNA, 20 nt, Artificial Sequence
  SAMD9 targeting guide sequence portion
agacuucuuguuuccaauuc

SEQ ID NO: 3072 - RNA, 20 nt, Artificial Sequence
  SAMD9 targeting guide sequence portion
aggaauuggaaacaagaagu

SEQ ID NO: 3073 - RNA, 20 nt, Artificial Sequence
  SAMD9 targeting guide sequence portion
agucuuucugggggacagaa

SEQ ID NO: 3074 - RNA, 20 nt, Artificial Sequence
  SAMD9 targeting guide sequence portion
auucuuaggaauuggaaaca

SEQ ID NO: 3075 - RNA, 20 nt, Artificial Sequence
  SAMD9 targeting guide sequence portion
auuggaaacaagaagucuuu

SEQ ID NO: 3076 - RNA, 20 nt, Artificial Sequence
  SAMD9 targeting guide sequence portion
auuuuucugucccccagaaa

SEQ ID NO: 3077 - RNA, 20 nt, Artificial Sequence
  SAMD9 targeting guide sequence portion
caaauuuuucugucccccag

SEQ ID NO: 3078 - RNA, 20 nt, Artificial Sequence
  SAMD9 targeting guide sequence portion
caagaagucuuucuggggga

SEQ ID NO: 3079 - RNA, 20 nt, Artificial Sequence
  SAMD9 targeting guide sequence portion
cagaaagacuucuuguuucc

SEQ ID NO: 3080 - RNA, 20 nt, Artificial Sequence
  SAMD9 targeting guide sequence portion
ccagaaagacuucuuguuuc

SEQ ID NO: 3081 - RNA, 20 nt, Artificial Sequence
  SAMD9 targeting guide sequence portion
cccagaaagacuucuuguuu

SEQ ID NO: 3082 - RNA, 20 nt, Artificial Sequence
  SAMD9 targeting guide sequence portion
ccccagaaagacuucuuguu

SEQ ID NO: 3083 - RNA, 20 nt, Artificial Sequence
  SAMD9 targeting guide sequence portion
cccccagaaagacuucuugu

SEQ ID NO: 3084 - RNA, 20 nt, Artificial Sequence
  SAMD9 targeting guide sequence portion
cugucccccagaaagacuuc

SEQ ID NO: 3085 - RNA, 20 nt, Artificial Sequence
  SAMD9 targeting guide sequence portion
cuuaggaauuggaaacaaga

SEQ ID NO: 3086 - RNA, 20 nt, Artificial Sequence
  SAMD9 targeting guide sequence portion
gaaacaagaagucuuucugg

SEQ ID NO: 3087 - RNA, 20 nt, Artificial Sequence
  SAMD9 targeting guide sequence portion
gaaagacuucuuguuuccaa

SEQ ID NO: 3088 - RNA, 20 nt, Artificial Sequence
  SAMD9 targeting guide sequence portion
gaagucuuucugggggacag

SEQ ID NO: 3089 - RNA, 20 nt, Artificial Sequence
  SAMD9 targeting guide sequence portion
gaauuggaaacaagaagucu

SEQ ID NO: 3090 - RNA, 20 nt, Artificial Sequence
  SAMD9 targeting guide sequence portion
gacuucuuguuuccaauucc

SEQ ID NO: 3091 - RNA, 20 nt, Artificial Sequence
  SAMD9 targeting guide sequence portion
ggaaacaagaagucuuucug

SEQ ID NO: 3092 - RNA, 20 nt, Artificial Sequence
  SAMD9 targeting guide sequence portion
ggaauuggaaacaagaaguc

SEQ ID NO: 3093 - RNA, 20 nt, Artificial Sequence
  SAMD9 targeting guide sequence portion
gucccccagaaagacuucuu

SEQ ID NO: 3094 - RNA, 20 nt, Artificial Sequence
  SAMD9 targeting guide sequence portion
gucuuucugggggacagaaa

SEQ ID NO: 3095 - RNA, 20 nt, Artificial Sequence
  SAMD9 targeting guide sequence portion
uaggaauuggaaacaagaag

SEQ ID NO: 3096 - RNA, 20 nt, Artificial Sequence
  SAMD9 targeting guide sequence portion
ucaaauuuuucuguccccca

SEQ ID NO: 3097 - RNA, 20 nt, Artificial Sequence
  SAMD9 targeting guide sequence portion
ucccccagaaagacuucuug

SEQ ID NO: 3098 - RNA, 20 nt, Artificial Sequence
  SAMD9 targeting guide sequence portion
ucugucccccagaaagacuu

SEQ ID NO: 3099 - RNA, 20 nt, Artificial Sequence
  SAMD9 targeting guide sequence portion
ucuuaggaauuggaaacaag

SEQ ID NO: 3100 - RNA, 20 nt, Artificial Sequence
  SAMD9 targeting guide sequence portion
ucuuucugggggacagaaaa

SEQ ID NO: 3101 - RNA, 20 nt, Artificial Sequence
  SAMD9 targeting guide sequence portion
uggaaacaagaagucuuucu

SEQ ID NO: 3102 - RNA, 20 nt, Artificial Sequence
  SAMD9 targeting guide sequence portion
ugucccccagaaagacuucu

SEQ ID NO: 3103 - RNA, 20 nt, Artificial Sequence
  SAMD9 targeting guide sequence portion
uuaggaauuggaaacaagaa

SEQ ID NO: 3104 - RNA, 20 nt, Artificial Sequence
  SAMD9 targeting guide sequence portion
uucugucccccagaaagacu

SEQ ID NO: 3105 - RNA, 20 nt, Artificial Sequence
  SAMD9 targeting guide sequence portion
uucuuaggaauuggaaacaa

SEQ ID NO: 3106 - RNA, 20 nt, Artificial Sequence
  SAMD9 targeting guide sequence portion
uuggaaacaagaagucuuuc

SEQ ID NO: 3107 - RNA, 20 nt, Artificial Sequence
  SAMD9 targeting guide sequence portion
uuucugucccccagaaagac

SEQ ID NO: 3108 - RNA, 20 nt, Artificial Sequence
  SAMD9 targeting guide sequence portion
uuuucugucccccagaaaga

SEQ ID NO: 3109 - RNA, 20 nt, Artificial Sequence
  SAMD9 targeting guide sequence portion
uuuuucugucccccagaaag

SEQ ID NO: 3110 - RNA, 21 nt, Artificial Sequence
  SAMD9 targeting guide sequence portion
aaacaagaagucuuucugggg

SEQ ID NO: 3111 - RNA, 21 nt, Artificial Sequence
  SAMD9 targeting guide sequence portion
aaagacuucuuguuuccaauu

SEQ ID NO: 3112 - RNA, 21 nt, Artificial Sequence
  SAMD9 targeting guide sequence portion
aaauuuuucugucccccagaa

SEQ ID NO: 3113 - RNA, 21 nt, Artificial Sequence
  SAMD9 targeting guide sequence portion
aacaagaagucuuucuggggg

SEQ ID NO: 3114 - RNA, 21 nt, Artificial Sequence
  SAMD9 targeting guide sequence portion
aagaagucuuucugggggaca

SEQ ID NO: 3115 - RNA, 21 nt, Artificial Sequence
  SAMD9 targeting guide sequence portion
aagacuucuuguuuccaauuc

SEQ ID NO: 3116 - RNA, 21 nt, Artificial Sequence
  SAMD9 targeting guide sequence portion
aagucuuucugggggacagaa

SEQ ID NO: 3117 - RNA, 21 nt, Artificial Sequence
  SAMD9 targeting guide sequence portion
aauucuuaggaauuggaaaca

SEQ ID NO: 3118 - RNA, 21 nt, Artificial Sequence
  SAMD9 targeting guide sequence portion
aauuggaaacaagaagucuuu

SEQ ID NO: 3119 - RNA, 21 nt, Artificial Sequence
  SAMD9 targeting guide sequence portion
aauuuuucugucccccagaaa

SEQ ID NO: 3120 - RNA, 21 nt, Artificial Sequence
  SAMD9 targeting guide sequence portion
acaagaagucuuucuggggga

SEQ ID NO: 3121 - RNA, 21 nt, Artificial Sequence
  SAMD9 targeting guide sequence portion
acuucuuguuuccaauuccua

SEQ ID NO: 3122 - RNA, 21 nt, Artificial Sequence
  SAMD9 targeting guide sequence portion
agaaagacuucuuguuuccaa

SEQ ID NO: 3123 - RNA, 21 nt, Artificial Sequence
  SAMD9 targeting guide sequence portion
agaagucuuucugggggacag

SEQ ID NO: 3124 - RNA, 21 nt, Artificial Sequence
  SAMD9 targeting guide sequence portion
agacuucuuguuuccaauucc

SEQ ID NO: 3125 - RNA, 21 nt, Artificial Sequence
  SAMD9 targeting guide sequence portion
aggaauuggaaacaagaaguc

SEQ ID NO: 3126 - RNA, 21 nt, Artificial Sequence
  SAMD9 targeting guide sequence portion
agucuuucugggggacagaaa

SEQ ID NO: 3127 - RNA, 21 nt, Artificial Sequence
  SAMD9 targeting guide sequence portion
auucuuaggaauuggaaacaa

SEQ ID NO: 3128 - RNA, 21 nt, Artificial Sequence
  SAMD9 targeting guide sequence portion
auuggaaacaagaagucuuuc

SEQ ID NO: 3129 - RNA, 21 nt, Artificial Sequence
  SAMD9 targeting guide sequence portion
auuuuucugucccccagaaag

SEQ ID NO: 3130 - RNA, 21 nt, Artificial Sequence
  SAMD9 targeting guide sequence portion
caaauuuuucugucccccaga

SEQ ID NO: 3131 - RNA, 21 nt, Artificial Sequence
  SAMD9 targeting guide sequence portion
caagaagucuuucugggggac

SEQ ID NO: 3132 - RNA, 21 nt, Artificial Sequence
  SAMD9 targeting guide sequence portion
cagaaagacuucuuguuucca

SEQ ID NO: 3133 - RNA, 21 nt, Artificial Sequence
  SAMD9 targeting guide sequence portion
ccagaaagacuucuuguuucc

SEQ ID NO: 3134 - RNA, 21 nt, Artificial Sequence
  SAMD9 targeting guide sequence portion
cccagaaagacuucuuguuuc

SEQ ID NO: 3135 - RNA, 21 nt, Artificial Sequence
  SAMD9 targeting guide sequence portion
ccccagaaagacuucuuguuu

SEQ ID NO: 3136 - RNA, 21 nt, Artificial Sequence
  SAMD9 targeting guide sequence portion
cccccagaaagacuucuuguu

SEQ ID NO: 3137 - RNA, 21 nt, Artificial Sequence
  SAMD9 targeting guide sequence portion
cugucccccagaaagacuucu

SEQ ID NO: 3138 - RNA, 21 nt, Artificial Sequence
  SAMD9 targeting guide sequence portion
cuuaggaauuggaaacaagaa

SEQ ID NO: 3139 - RNA, 21 nt, Artificial Sequence
  SAMD9 targeting guide sequence portion
gaaacaagaagucuuucuggg

SEQ ID NO: 3140 - RNA, 21 nt, Artificial Sequence
  SAMD9 targeting guide sequence portion
gaaagacuucuuguuuccaau

SEQ ID NO: 3141 - RNA, 21 nt, Artificial Sequence
  SAMD9 targeting guide sequence portion
gaagucuuucugggggacaga

SEQ ID NO: 3142 - RNA, 21 nt, Artificial Sequence
  SAMD9 targeting guide sequence portion
gaauuggaaacaagaagucuu

SEQ ID NO: 3143 - RNA, 21 nt, Artificial Sequence
  SAMD9 targeting guide sequence portion
gacuucuuguuuccaauuccu

SEQ ID NO: 3144 - RNA, 21 nt, Artificial Sequence
  SAMD9 targeting guide sequence portion
ggaaacaagaagucuuucugg

SEQ ID NO: 3145 - RNA, 21 nt, Artificial Sequence
  SAMD9 targeting guide sequence portion
ggaauuggaaacaagaagucu

SEQ ID NO: 3146 - RNA, 21 nt, Artificial Sequence
  SAMD9 targeting guide sequence portion
gucccccagaaagacuucuug

SEQ ID NO: 3147 - RNA, 21 nt, Artificial Sequence
  SAMD9 targeting guide sequence portion
gucuuucugggggacagaaaa

SEQ ID NO: 3148 - RNA, 21 nt, Artificial Sequence
  SAMD9 targeting guide sequence portion
uaggaauuggaaacaagaagu

SEQ ID NO: 3149 - RNA, 21 nt, Artificial Sequence
  SAMD9 targeting guide sequence portion
ucaaauuuuucugucccccag

SEQ ID NO: 3150 - RNA, 21 nt, Artificial Sequence
  SAMD9 targeting guide sequence portion
ucccccagaaagacuucuugu

SEQ ID NO: 3151 - RNA, 21 nt, Artificial Sequence
  SAMD9 targeting guide sequence portion
ucugucccccagaaagacuuc

SEQ ID NO: 3152 - RNA, 21 nt, Artificial Sequence
  SAMD9 targeting guide sequence portion
ucuuaggaauuggaaacaaga

SEQ ID NO: 3153 - RNA, 21 nt, Artificial Sequence
  SAMD9 targeting guide sequence portion
ucuuucugggggacagaaaaa

SEQ ID NO: 3154 - RNA, 21 nt, Artificial Sequence
  SAMD9 targeting guide sequence portion
uggaaacaagaagucuuucug

SEQ ID NO: 3155 - RNA, 21 nt, Artificial Sequence
  SAMD9 targeting guide sequence portion
ugucccccagaaagacuucuu

SEQ ID NO: 3156 - RNA, 21 nt, Artificial Sequence
  SAMD9 targeting guide sequence portion
uuaggaauuggaaacaagaag

SEQ ID NO: 3157 - RNA, 21 nt, Artificial Sequence
  SAMD9 targeting guide sequence portion
uucaaauuuuucuguccccca

SEQ ID NO: 3158 - RNA, 21 nt, Artificial Sequence
  SAMD9 targeting guide sequence portion
uucugucccccagaaagacuu

SEQ ID NO: 3159 - RNA, 21 nt, Artificial Sequence
  SAMD9 targeting guide sequence portion
uucuuaggaauuggaaacaag

SEQ ID NO: 3160 - RNA, 21 nt, Artificial Sequence
  SAMD9 targeting guide sequence portion
uuggaaacaagaagucuuucu

SEQ ID NO: 3161 - RNA, 21 nt, Artificial Sequence
  SAMD9 targeting guide sequence portion
uuucugucccccagaaagacu

SEQ ID NO: 3162 - RNA, 21 nt, Artificial Sequence
  SAMD9 targeting guide sequence portion
uuuucugucccccagaaagac

SEQ ID NO: 3163 - RNA, 21 nt, Artificial Sequence
  SAMD9 targeting guide sequence portion
uuuuucugucccccagaaaga

SEQ ID NO: 3164 - RNA, 22 nt, Artificial Sequence
  SAMD9 targeting guide sequence portion
aaacaagaagucuuucuggggg

SEQ ID NO: 3165 - RNA, 22 nt, Artificial Sequence
  SAMD9 targeting guide sequence portion
aaagacuucuuguuuccaauuc

SEQ ID NO: 3166 - RNA, 22 nt, Artificial Sequence
  SAMD9 targeting guide sequence portion
aaauucuuaggaauuggaaaca

SEQ ID NO: 3167 - RNA, 22 nt, Artificial Sequence
  SAMD9 targeting guide sequence portion
aaauuuuucugucccccagaaa

SEQ ID NO: 3168 - RNA, 22 nt, Artificial Sequence
  SAMD9 targeting guide sequence portion
aacaagaagucuuucuggggga

SEQ ID NO: 3169 - RNA, 22 nt, Artificial Sequence
  SAMD9 targeting guide sequence portion
aagaagucuuucugggggacag

SEQ ID NO: 3170 - RNA, 22 nt, Artificial Sequence
  SAMD9 targeting guide sequence portion
aagacuucuuguuuccaauucc

SEQ ID NO: 3171 - RNA, 22 nt, Artificial Sequence
  SAMD9 targeting guide sequence portion
aagucuuucugggggacagaaa

SEQ ID NO: 3172 - RNA, 22 nt, Artificial Sequence
  SAMD9 targeting guide sequence portion
aauucuuaggaauuggaaacaa

SEQ ID NO: 3173 - RNA, 22 nt, Artificial Sequence
  SAMD9 targeting guide sequence portion
aauuggaaacaagaagucuuuc

SEQ ID NO: 3174 - RNA, 22 nt, Artificial Sequence
  SAMD9 targeting guide sequence portion
aauuuuucugucccccagaaag

SEQ ID NO: 3175 - RNA, 22 nt, Artificial Sequence
  SAMD9 targeting guide sequence portion
acaagaagucuuucugggggac

SEQ ID NO: 3176 - RNA, 22 nt, Artificial Sequence
  SAMD9 targeting guide sequence portion
acuucuuguuuccaauuccuaa

SEQ ID NO: 3177 - RNA, 22 nt, Artificial Sequence
  SAMD9 targeting guide sequence portion
agaaagacuucuuguuuccaau

SEQ ID NO: 3178 - RNA, 22 nt, Artificial Sequence
  SAMD9 targeting guide sequence portion
agaagucuuucugggggacaga

SEQ ID NO: 3179 - RNA, 22 nt, Artificial Sequence
  SAMD9 targeting guide sequence portion
agacuucuuguuuccaauuccu

SEQ ID NO: 3180 - RNA, 22 nt, Artificial Sequence
  SAMD9 targeting guide sequence portion
aggaauuggaaacaagaagucu

SEQ ID NO: 3181 - RNA, 22 nt, Artificial Sequence
  SAMD9 targeting guide sequence portion
agucuuucugggggacagaaaa

SEQ ID NO: 3182 - RNA, 22 nt, Artificial Sequence
  SAMD9 targeting guide sequence portion
auucuuaggaauuggaaacaag

SEQ ID NO: 3183 - RNA, 22 nt, Artificial Sequence
  SAMD9 targeting guide sequence portion
auuggaaacaagaagucuuucu

SEQ ID NO: 3184 - RNA, 22 nt, Artificial Sequence
  SAMD9 targeting guide sequence portion
auuuuucugucccccagaaaga

SEQ ID NO: 3185 - RNA, 22 nt, Artificial Sequence
  SAMD9 targeting guide sequence portion
caaauuuuucugucccccagaa

SEQ ID NO: 3186 - RNA, 22 nt, Artificial Sequence
  SAMD9 targeting guide sequence portion
caagaagucuuucugggggaca

SEQ ID NO: 3187 - RNA, 22 nt, Artificial Sequence
  SAMD9 targeting guide sequence portion
cagaaagacuucuuguuuccaa

SEQ ID NO: 3188 - RNA, 22 nt, Artificial Sequence
  SAMD9 targeting guide sequence portion
ccagaaagacuucuuguuucca

SEQ ID NO: 3189 - RNA, 22 nt, Artificial Sequence
  SAMD9 targeting guide sequence portion
cccagaaagacuucuuguuucc

SEQ ID NO: 3190 - RNA, 22 nt, Artificial Sequence
  SAMD9 targeting guide sequence portion
ccccagaaagacuucuuguuuc

SEQ ID NO: 3191 - RNA, 22 nt, Artificial Sequence
  SAMD9 targeting guide sequence portion
cccccagaaagacuucuuguuu

SEQ ID NO: 3192 - RNA, 22 nt, Artificial Sequence
  SAMD9 targeting guide sequence portion
cugucccccagaaagacuucuu

SEQ ID NO: 3193 - RNA, 22 nt, Artificial Sequence
  SAMD9 targeting guide sequence portion
cuuaggaauuggaaacaagaag

SEQ ID NO: 3194 - RNA, 22 nt, Artificial Sequence
  SAMD9 targeting guide sequence portion
cuucaaauuuuucuguccccca

SEQ ID NO: 3195 - RNA, 22 nt, Artificial Sequence
  SAMD9 targeting guide sequence portion
gaaacaagaagucuuucugggg

SEQ ID NO: 3196 - RNA, 22 nt, Artificial Sequence
  SAMD9 targeting guide sequence portion
gaaagacuucuuguuuccaauu

SEQ ID NO: 3197 - RNA, 22 nt, Artificial Sequence
  SAMD9 targeting guide sequence portion
gaagucuuucugggggacagaa

SEQ ID NO: 3198 - RNA, 22 nt, Artificial Sequence
  SAMD9 targeting guide sequence portion
gaauuggaaacaagaagucuuu

SEQ ID NO: 3199 - RNA, 22 nt, Artificial Sequence
  SAMD9 targeting guide sequence portion
gacuucuuguuuccaauuccua

SEQ ID NO: 3200 - RNA, 22 nt, Artificial Sequence
  SAMD9 targeting guide sequence portion
ggaaacaagaagucuuucuggg

SEQ ID NO: 3201 - RNA, 22 nt, Artificial Sequence
  SAMD9 targeting guide sequence portion
ggaauuggaaacaagaagucuu

SEQ ID NO: 3202 - RNA, 22 nt, Artificial Sequence
  SAMD9 targeting guide sequence portion
gucccccagaaagacuucuugu

SEQ ID NO: 3203 - RNA, 22 nt, Artificial Sequence
  SAMD9 targeting guide sequence portion
gucuuucugggggacagaaaaa

SEQ ID NO: 3204 - RNA, 22 nt, Artificial Sequence
  SAMD9 targeting guide sequence portion
uaggaauuggaaacaagaaguc

SEQ ID NO: 3205 - RNA, 22 nt, Artificial Sequence
  SAMD9 targeting guide sequence portion
ucaaauuuuucugucccccaga

SEQ ID NO: 3206 - RNA, 22 nt, Artificial Sequence
  SAMD9 targeting guide sequence portion
ucccccagaaagacuucuuguu

SEQ ID NO: 3207 - RNA, 22 nt, Artificial Sequence
  SAMD9 targeting guide sequence portion
ucugucccccagaaagacuucu

SEQ ID NO: 3208 - RNA, 22 nt, Artificial Sequence
  SAMD9 targeting guide sequence portion
ucuuaggaauuggaaacaagaa

SEQ ID NO: 3209 - RNA, 22 nt, Artificial Sequence
  SAMD9 targeting guide sequence portion
ucuuucugggggacagaaaaau

SEQ ID NO: 3210 - RNA, 22 nt, Artificial Sequence
  SAMD9 targeting guide sequence portion
uggaaacaagaagucuuucugg

SEQ ID NO: 3211 - RNA, 22 nt, Artificial Sequence
  SAMD9 targeting guide sequence portion
ugucccccagaaagacuucuug

SEQ ID NO: 3212 - RNA, 22 nt, Artificial Sequence
  SAMD9 targeting guide sequence portion
uuaggaauuggaaacaagaagu

SEQ ID NO: 3213 - RNA, 22 nt, Artificial Sequence
  SAMD9 targeting guide sequence portion
uucaaauuuuucugucccccag

SEQ ID NO: 3214 - RNA, 22 nt, Artificial Sequence
  SAMD9 targeting guide sequence portion
uucugucccccagaaagacuuc

SEQ ID NO: 3215 - RNA, 22 nt, Artificial Sequence
  SAMD9 targeting guide sequence portion
uucuuaggaauuggaaacaaga

SEQ ID NO: 3216 - RNA, 22 nt, Artificial Sequence
  SAMD9 targeting guide sequence portion
uuggaaacaagaagucuuucug

SEQ ID NO: 3217 - RNA, 22 nt, Artificial Sequence
  SAMD9 targeting guide sequence portion
uuucugucccccagaaagacuu

SEQ ID NO: 3218 - RNA, 22 nt, Artificial Sequence
  SAMD9 targeting guide sequence portion
uuuucugucccccagaaagacu

SEQ ID NO: 3219 - RNA, 22 nt, Artificial Sequence
  SAMD9 targeting guide sequence portion
uuuuucugucccccagaaagac

SEQ ID NO: 3220 - RNA, 20 nt, Artificial Sequence
  SAMD9 targeting guide sequence portion
aaaaugugguccagaauauc

SEQ ID NO: 3221 - RNA, 20 nt, Artificial Sequence
  SAMD9 targeting guide sequence portion
aaagaauacauagaaaaugu

SEQ ID NO: 3222 - RNA, 20 nt, Artificial Sequence
  SAMD9 targeting guide sequence portion
aaaugugguccagaauaucc

SEQ ID NO: 3223 - RNA, 20 nt, Artificial Sequence
  SAMD9 targeting guide sequence portion
aagaauacauagaaaaugug

SEQ ID NO: 3224 - RNA, 20 nt, Artificial Sequence
  SAMD9 targeting guide sequence portion
aauacauagaaaaugugguc

SEQ ID NO: 3225 - RNA, 20 nt, Artificial Sequence
  SAMD9 targeting guide sequence portion
aauauucugcccuuucagga

SEQ ID NO: 3226 - RNA, 20 nt, Artificial Sequence
  SAMD9 targeting guide sequence portion
aaugugguccagaauauccu

SEQ ID NO: 3227 - RNA, 20 nt, Artificial Sequence
  SAMD9 targeting guide sequence portion
acauagaaaaugugguccag

SEQ ID NO: 3228 - RNA, 20 nt, Artificial Sequence
  SAMD9 targeting guide sequence portion
agaaaaugugguccagaaua

SEQ ID NO: 3229 - RNA, 20 nt, Artificial Sequence
  SAMD9 targeting guide sequence portion
agaauacauagaaaaugugg

SEQ ID NO: 3230 - RNA, 20 nt, Artificial Sequence
  SAMD9 targeting guide sequence portion
agaauauccugaaagggcag

SEQ ID NO: 3231 - RNA, 20 nt, Artificial Sequence
  SAMD9 targeting guide sequence portion
aggauauucuggaccacauu

SEQ ID NO: 3232 - RNA, 20 nt, Artificial Sequence
  SAMD9 targeting guide sequence portion
auacauagaaaauguggucc

SEQ ID NO: 3233 - RNA, 20 nt, Artificial Sequence
  SAMD9 targeting guide sequence portion
auagaaaaugugguccagaa

SEQ ID NO: 3234 - RNA, 20 nt, Artificial Sequence
  SAMD9 targeting guide sequence portion
auauucugcccuuucaggau

SEQ ID NO: 3235 - RNA, 20 nt, Artificial Sequence
  SAMD9 targeting guide sequence portion
auauucuggaccacauuuuc

SEQ ID NO: 3236 - RNA, 20 nt, Artificial Sequence
  SAMD9 targeting guide sequence portion
augugguccagaauauccug

SEQ ID NO: 3237 - RNA, 20 nt, Artificial Sequence
  SAMD9 targeting guide sequence portion
auucugcccuuucaggauau

SEQ ID NO: 3238 - RNA, 20 nt, Artificial Sequence
  SAMD9 targeting guide sequence portion
auucuggaccacauuuucua

SEQ ID NO: 3239 - RNA, 20 nt, Artificial Sequence
  SAMD9 targeting guide sequence portion
cagaauauccugaaagggca

SEQ ID NO: 3240 - RNA, 20 nt, Artificial Sequence
  SAMD9 targeting guide sequence portion
caggauauucuggaccacau

SEQ ID NO: 3241 - RNA, 20 nt, Artificial Sequence
  SAMD9 targeting guide sequence portion
cauagaaaaugugguccaga

SEQ ID NO: 3242 - RNA, 20 nt, Artificial Sequence
  SAMD9 targeting guide sequence portion
ccagaauauccugaaagggc

SEQ ID NO: 3243 - RNA, 20 nt, Artificial Sequence
  SAMD9 targeting guide sequence portion
cccuuucaggauauucugga

SEQ ID NO: 3244 - RNA, 20 nt, Artificial Sequence
  SAMD9 targeting guide sequence portion
ccuuucaggauauucuggac

SEQ ID NO: 3245 - RNA, 20 nt, Artificial Sequence
  SAMD9 targeting guide sequence portion
cugcccuuucaggauauucu

SEQ ID NO: 3246 - RNA, 20 nt, Artificial Sequence
  SAMD9 targeting guide sequence portion
cuggaccacauuuucuaugu

SEQ ID NO: 3247 - RNA, 20 nt, Artificial Sequence
  SAMD9 targeting guide sequence portion
cuuucaggauauucuggacc

SEQ ID NO: 3248 - RNA, 20 nt, Artificial Sequence
  SAMD9 targeting guide sequence portion
gaaaaugugguccagaauau

SEQ ID NO: 3249 - RNA, 20 nt, Artificial Sequence
  SAMD9 targeting guide sequence portion
gaauacauagaaaauguggu

SEQ ID NO: 3250 - RNA, 20 nt, Artificial Sequence
  SAMD9 targeting guide sequence portion
gauauucuggaccacauuuu

SEQ ID NO: 3251 - RNA, 20 nt, Artificial Sequence
  SAMD9 targeting guide sequence portion
gcccuuucaggauauucugg

SEQ ID NO: 3252 - RNA, 20 nt, Artificial Sequence
  SAMD9 targeting guide sequence portion
ggauauucuggaccacauuu

SEQ ID NO: 3253 - RNA, 20 nt, Artificial Sequence
  SAMD9 targeting guide sequence portion
gguccagaauauccugaaag

SEQ ID NO: 3254 - RNA, 20 nt, Artificial Sequence
  SAMD9 targeting guide sequence portion
guccagaauauccugaaagg

SEQ ID NO: 3255 - RNA, 20 nt, Artificial Sequence
  SAMD9 targeting guide sequence portion
gugguccagaauauccugaa

SEQ ID NO: 3256 - RNA, 20 nt, Artificial Sequence
  SAMD9 targeting guide sequence portion
uacauagaaaauguggucca

SEQ ID NO: 3257 - RNA, 20 nt, Artificial Sequence
  SAMD9 targeting guide sequence portion
uagaaaaugugguccagaau

SEQ ID NO: 3258 - RNA, 20 nt, Artificial Sequence
  SAMD9 targeting guide sequence portion
uauucugcccuuucaggaua

SEQ ID NO: 3259 - RNA, 20 nt, Artificial Sequence
  SAMD9 targeting guide sequence portion
uauucuggaccacauuuucu

SEQ ID NO: 3260 - RNA, 20 nt, Artificial Sequence
  SAMD9 targeting guide sequence portion
ucaggauauucuggaccaca

SEQ ID NO: 3261 - RNA, 20 nt, Artificial Sequence
  SAMD9 targeting guide sequence portion
uccagaauauccugaaaggg

SEQ ID NO: 3262 - RNA, 20 nt, Artificial Sequence
  SAMD9 targeting guide sequence portion
ucugcccuuucaggauauuc

SEQ ID NO: 3263 - RNA, 20 nt, Artificial Sequence
  SAMD9 targeting guide sequence portion
ucuggaccacauuuucuaug

SEQ ID NO: 3264 - RNA, 20 nt, Artificial Sequence
  SAMD9 targeting guide sequence portion
ugcccuuucaggauauucug

SEQ ID NO: 3265 - RNA, 20 nt, Artificial Sequence
  SAMD9 targeting guide sequence portion
uggaccacauuuucuaugua

SEQ ID NO: 3266 - RNA, 20 nt, Artificial Sequence
  SAMD9 targeting guide sequence portion
ugguccagaauauccugaaa

SEQ ID NO: 3267 - RNA, 20 nt, Artificial Sequence
  SAMD9 targeting guide sequence portion
ugugguccagaauauccuga

SEQ ID NO: 3268 - RNA, 20 nt, Artificial Sequence
  SAMD9 targeting guide sequence portion
uucaggauauucuggaccac

SEQ ID NO: 3269 - RNA, 20 nt, Artificial Sequence
  SAMD9 targeting guide sequence portion
uucugcccuuucaggauauu

SEQ ID NO: 3270 - RNA, 20 nt, Artificial Sequence
  SAMD9 targeting guide sequence portion
uucuggaccacauuuucuau

SEQ ID NO: 3271 - RNA, 20 nt, Artificial Sequence
  SAMD9 targeting guide sequence portion
uuucaggauauucuggacca

SEQ ID NO: 3272 - RNA, 21 nt, Artificial Sequence
  SAMD9 targeting guide sequence portion
aaaaugugguccagaauaucc

SEQ ID NO: 3273 - RNA, 21 nt, Artificial Sequence
  SAMD9 targeting guide sequence portion
aaagaauacauagaaaaugug

SEQ ID NO: 3274 - RNA, 21 nt, Artificial Sequence
  SAMD9 targeting guide sequence portion
aaauauucugcccuuucagga

SEQ ID NO: 3275 - RNA, 21 nt, Artificial Sequence
  SAMD9 targeting guide sequence portion
aaaugugguccagaauauccu

SEQ ID NO: 3276 - RNA, 21 nt, Artificial Sequence
  SAMD9 targeting guide sequence portion
aagaauacauagaaaaugugg

SEQ ID NO: 3277 - RNA, 21 nt, Artificial Sequence
  SAMD9 targeting guide sequence portion
aauacauagaaaauguggucc

SEQ ID NO: 3278 - RNA, 21 nt, Artificial Sequence
  SAMD9 targeting guide sequence portion
aauauucugcccuuucaggau

SEQ ID NO: 3279 - RNA, 21 nt, Artificial Sequence
  SAMD9 targeting guide sequence portion
aaugugguccagaauauccug

SEQ ID NO: 3280 - RNA, 21 nt, Artificial Sequence
  SAMD9 targeting guide sequence portion
acauagaaaaugugguccaga

SEQ ID NO: 3281 - RNA, 21 nt, Artificial Sequence
  SAMD9 targeting guide sequence portion
agaaaaugugguccagaauau

SEQ ID NO: 3282 - RNA, 21 nt, Artificial Sequence
  SAMD9 targeting guide sequence portion
agaauacauagaaaauguggu

SEQ ID NO: 3283 - RNA, 21 nt, Artificial Sequence
  SAMD9 targeting guide sequence portion
agaauauccugaaagggcaga

SEQ ID NO: 3284 - RNA, 21 nt, Artificial Sequence
  SAMD9 targeting guide sequence portion
aggauauucuggaccacauuu

SEQ ID NO: 3285 - RNA, 21 nt, Artificial Sequence
  SAMD9 targeting guide sequence portion
auacauagaaaauguggucca

SEQ ID NO: 3286 - RNA, 21 nt, Artificial Sequence
  SAMD9 targeting guide sequence portion
auagaaaaugugguccagaau

SEQ ID NO: 3287 - RNA, 21 nt, Artificial Sequence
  SAMD9 targeting guide sequence portion
auauucugcccuuucaggaua

SEQ ID NO: 3288 - RNA, 21 nt, Artificial Sequence
  SAMD9 targeting guide sequence portion
auauucuggaccacauuuucu

SEQ ID NO: 3289 - RNA, 21 nt, Artificial Sequence
  SAMD9 targeting guide sequence portion
augugguccagaauauccuga

SEQ ID NO: 3290 - RNA, 21 nt, Artificial Sequence
  SAMD9 targeting guide sequence portion
auucugcccuuucaggauauu

SEQ ID NO: 3291 - RNA, 21 nt, Artificial Sequence
  SAMD9 targeting guide sequence portion
auucuggaccacauuuucuau

SEQ ID NO: 3292 - RNA, 21 nt, Artificial Sequence
  SAMD9 targeting guide sequence portion
cagaauauccugaaagggcag

SEQ ID NO: 3293 - RNA, 21 nt, Artificial Sequence
  SAMD9 targeting guide sequence portion
caggauauucuggaccacauu

SEQ ID NO: 3294 - RNA, 21 nt, Artificial Sequence
  SAMD9 targeting guide sequence portion
cauagaaaaugugguccagaa

SEQ ID NO: 3295 - RNA, 21 nt, Artificial Sequence
  SAMD9 targeting guide sequence portion
ccagaauauccugaaagggca

SEQ ID NO: 3296 - RNA, 21 nt, Artificial Sequence
  SAMD9 targeting guide sequence portion
cccuuucaggauauucuggac

SEQ ID NO: 3297 - RNA, 21 nt, Artificial Sequence
  SAMD9 targeting guide sequence portion
ccuuucaggauauucuggacc

SEQ ID NO: 3298 - RNA, 21 nt, Artificial Sequence
  SAMD9 targeting guide sequence portion
cugcccuuucaggauauucug

SEQ ID NO: 3299 - RNA, 21 nt, Artificial Sequence
  SAMD9 targeting guide sequence portion
cuggaccacauuuucuaugua

SEQ ID NO: 3300 - RNA, 21 nt, Artificial Sequence
  SAMD9 targeting guide sequence portion
cuuucaggauauucuggacca

SEQ ID NO: 3301 - RNA, 21 nt, Artificial Sequence
  SAMD9 targeting guide sequence portion
gaaaaugugguccagaauauc

SEQ ID NO: 3302 - RNA, 21 nt, Artificial Sequence
  SAMD9 targeting guide sequence portion
gaauacauagaaaaugugguc

SEQ ID NO: 3303 - RNA, 21 nt, Artificial Sequence
  SAMD9 targeting guide sequence portion
gauauucuggaccacauuuuc

SEQ ID NO: 3304 - RNA, 21 nt, Artificial Sequence
  SAMD9 targeting guide sequence portion
gcccuuucaggauauucugga

SEQ ID NO: 3305 - RNA, 21 nt, Artificial Sequence
  SAMD9 targeting guide sequence portion
ggauauucuggaccacauuuu

SEQ ID NO: 3306 - RNA, 21 nt, Artificial Sequence
  SAMD9 targeting guide sequence portion
gguccagaauauccugaaagg

SEQ ID NO: 3307 - RNA, 21 nt, Artificial Sequence
  SAMD9 targeting guide sequence portion
guccagaauauccugaaaggg

SEQ ID NO: 3308 - RNA, 21 nt, Artificial Sequence
  SAMD9 targeting guide sequence portion
gugguccagaauauccugaaa

SEQ ID NO: 3309 - RNA, 21 nt, Artificial Sequence
  SAMD9 targeting guide sequence portion
uacauagaaaaugugguccag

SEQ ID NO: 3310 - RNA, 21 nt, Artificial Sequence
  SAMD9 targeting guide sequence portion
uagaaaaugugguccagaaua

SEQ ID NO: 3311 - RNA, 21 nt, Artificial Sequence
  SAMD9 targeting guide sequence portion
uauucugcccuuucaggauau

SEQ ID NO: 3312 - RNA, 21 nt, Artificial Sequence
  SAMD9 targeting guide sequence portion
uauucuggaccacauuuucua

SEQ ID NO: 3313 - RNA, 21 nt, Artificial Sequence
  SAMD9 targeting guide sequence portion
ucaggauauucuggaccacau

SEQ ID NO: 3314 - RNA, 21 nt, Artificial Sequence
  SAMD9 targeting guide sequence portion
uccagaauauccugaaagggc

SEQ ID NO: 3315 - RNA, 21 nt, Artificial Sequence
  SAMD9 targeting guide sequence portion
ucugcccuuucaggauauucu

SEQ ID NO: 3316 - RNA, 21 nt, Artificial Sequence
  SAMD9 targeting guide sequence portion
ucuggaccacauuuucuaugu

SEQ ID NO: 3317 - RNA, 21 nt, Artificial Sequence
  SAMD9 targeting guide sequence portion
ugcccuuucaggauauucugg

SEQ ID NO: 3318 - RNA, 21 nt, Artificial Sequence
  SAMD9 targeting guide sequence portion
uggaccacauuuucuauguau

SEQ ID NO: 3319 - RNA, 21 nt, Artificial Sequence
  SAMD9 targeting guide sequence portion
ugguccagaauauccugaaag

SEQ ID NO: 3320 - RNA, 21 nt, Artificial Sequence
  SAMD9 targeting guide sequence portion
ugugguccagaauauccugaa

SEQ ID NO: 3321 - RNA, 21 nt, Artificial Sequence
  SAMD9 targeting guide sequence portion
uucaggauauucuggaccaca

SEQ ID NO: 3322 - RNA, 21 nt, Artificial Sequence
  SAMD9 targeting guide sequence portion
uucugcccuuucaggauauuc

SEQ ID NO: 3323 - RNA, 21 nt, Artificial Sequence
  SAMD9 targeting guide sequence portion
uucuggaccacauuuucuaug

SEQ ID NO: 3324 - RNA, 21 nt, Artificial Sequence
  SAMD9 targeting guide sequence portion
uuucaggauauucuggaccac

SEQ ID NO: 3325 - RNA, 22 nt, Artificial Sequence
  SAMD9 targeting guide sequence portion
aaaauauucugcccuuucagga

SEQ ID NO: 3326 - RNA, 22 nt, Artificial Sequence
  SAMD9 targeting guide sequence portion
aaaaugugguccagaauauccu

SEQ ID NO: 3327 - RNA, 22 nt, Artificial Sequence
  SAMD9 targeting guide sequence portion
aaagaauacauagaaaaugugg

SEQ ID NO: 3328 - RNA, 22 nt, Artificial Sequence
  SAMD9 targeting guide sequence portion
aaauauucugcccuuucaggau

SEQ ID NO: 3329 - RNA, 22 nt, Artificial Sequence
  SAMD9 targeting guide sequence portion
aaaugugguccagaauauccug

SEQ ID NO: 3330 - RNA, 22 nt, Artificial Sequence
  SAMD9 targeting guide sequence portion
aagaauacauagaaaauguggu

SEQ ID NO: 3331 - RNA, 22 nt, Artificial Sequence
  SAMD9 targeting guide sequence portion
aauacauagaaaauguggucca

SEQ ID NO: 3332 - RNA, 22 nt, Artificial Sequence
  SAMD9 targeting guide sequence portion
aauauucugcccuuucaggaua

SEQ ID NO: 3333 - RNA, 22 nt, Artificial Sequence
  SAMD9 targeting guide sequence portion
aaugugguccagaauauccuga

SEQ ID NO: 3334 - RNA, 22 nt, Artificial Sequence
  SAMD9 targeting guide sequence portion
acauagaaaaugugguccagaa

SEQ ID NO: 3335 - RNA, 22 nt, Artificial Sequence
  SAMD9 targeting guide sequence portion
agaaaaugugguccagaauauc

SEQ ID NO: 3336 - RNA, 22 nt, Artificial Sequence
  SAMD9 targeting guide sequence portion
agaauacauagaaaaugugguc

SEQ ID NO: 3337 - RNA, 22 nt, Artificial Sequence
  SAMD9 targeting guide sequence portion
agaauauccugaaagggcagaa

SEQ ID NO: 3338 - RNA, 22 nt, Artificial Sequence
  SAMD9 targeting guide sequence portion
aggauauucuggaccacauuuu

SEQ ID NO: 3339 - RNA, 22 nt, Artificial Sequence
  SAMD9 targeting guide sequence portion
auacauagaaaaugugguccag

SEQ ID NO: 3340 - RNA, 22 nt, Artificial Sequence
  SAMD9 targeting guide sequence portion
auagaaaaugugguccagaaua

SEQ ID NO: 3341 - RNA, 22 nt, Artificial Sequence
  SAMD9 targeting guide sequence portion
auauucugcccuuucaggauau

SEQ ID NO: 3342 - RNA, 22 nt, Artificial Sequence
  SAMD9 targeting guide sequence portion
auauucuggaccacauuuucua

SEQ ID NO: 3343 - RNA, 22 nt, Artificial Sequence
  SAMD9 targeting guide sequence portion
augugguccagaauauccugaa

SEQ ID NO: 3344 - RNA, 22 nt, Artificial Sequence
  SAMD9 targeting guide sequence portion
auucugcccuuucaggauauuc

SEQ ID NO: 3345 - RNA, 22 nt, Artificial Sequence
  SAMD9 targeting guide sequence portion
auucuggaccacauuuucuaug

SEQ ID NO: 3346 - RNA, 22 nt, Artificial Sequence
  SAMD9 targeting guide sequence portion
cagaauauccugaaagggcaga

SEQ ID NO: 3347 - RNA, 22 nt, Artificial Sequence
  SAMD9 targeting guide sequence portion
caggauauucuggaccacauuu

SEQ ID NO: 3348 - RNA, 22 nt, Artificial Sequence
  SAMD9 targeting guide sequence portion
cauagaaaaugugguccagaau

SEQ ID NO: 3349 - RNA, 22 nt, Artificial Sequence
  SAMD9 targeting guide sequence portion
ccagaauauccugaaagggcag

SEQ ID NO: 3350 - RNA, 22 nt, Artificial Sequence
  SAMD9 targeting guide sequence portion
cccuuucaggauauucuggacc

SEQ ID NO: 3351 - RNA, 22 nt, Artificial Sequence
  SAMD9 targeting guide sequence portion
ccuuucaggauauucuggacca

SEQ ID NO: 3352 - RNA, 22 nt, Artificial Sequence
  SAMD9 targeting guide sequence portion
cugcccuuucaggauauucugg

SEQ ID NO: 3353 - RNA, 22 nt, Artificial Sequence
  SAMD9 targeting guide sequence portion
cuggaccacauuuucuauguau

SEQ ID NO: 3354 - RNA, 22 nt, Artificial Sequence
  SAMD9 targeting guide sequence portion
cuuucaggauauucuggaccac

SEQ ID NO: 3355 - RNA, 22 nt, Artificial Sequence
  SAMD9 targeting guide sequence portion
gaaaaugugguccagaauaucc

SEQ ID NO: 3356 - RNA, 22 nt, Artificial Sequence
  SAMD9 targeting guide sequence portion
gaauacauagaaaauguggucc

SEQ ID NO: 3357 - RNA, 22 nt, Artificial Sequence
  SAMD9 targeting guide sequence portion
gauauucuggaccacauuuucu

SEQ ID NO: 3358 - RNA, 22 nt, Artificial Sequence
  SAMD9 targeting guide sequence portion
gcccuuucaggauauucuggac

SEQ ID NO: 3359 - RNA, 22 nt, Artificial Sequence
  SAMD9 targeting guide sequence portion
ggauauucuggaccacauuuuc

SEQ ID NO: 3360 - RNA, 22 nt, Artificial Sequence
  SAMD9 targeting guide sequence portion
gguccagaauauccugaaaggg

SEQ ID NO: 3361 - RNA, 22 nt, Artificial Sequence
  SAMD9 targeting guide sequence portion
guccagaauauccugaaagggc

SEQ ID NO: 3362 - RNA, 22 nt, Artificial Sequence
  SAMD9 targeting guide sequence portion
gugguccagaauauccugaaag

SEQ ID NO: 3363 - RNA, 22 nt, Artificial Sequence
  SAMD9 targeting guide sequence portion
uaaagaauacauagaaaaugug

SEQ ID NO: 3364 - RNA, 22 nt, Artificial Sequence
  SAMD9 targeting guide sequence portion
uacauagaaaaugugguccaga

SEQ ID NO: 3365 - RNA, 22 nt, Artificial Sequence
  SAMD9 targeting guide sequence portion
uagaaaaugugguccagaauau

SEQ ID NO: 3366 - RNA, 22 nt, Artificial Sequence
  SAMD9 targeting guide sequence portion
uauucugcccuuucaggauauu

SEQ ID NO: 3367 - RNA, 22 nt, Artificial Sequence
  SAMD9 targeting guide sequence portion
uauucuggaccacauuuucuau

SEQ ID NO: 3368 - RNA, 22 nt, Artificial Sequence
  SAMD9 targeting guide sequence portion
ucaggauauucuggaccacauu

SEQ ID NO: 3369 - RNA, 22 nt, Artificial Sequence
  SAMD9 targeting guide sequence portion
uccagaauauccugaaagggca

SEQ ID NO: 3370 - RNA, 22 nt, Artificial Sequence
  SAMD9 targeting guide sequence portion
ucugcccuuucaggauauucug

SEQ ID NO: 3371 - RNA, 22 nt, Artificial Sequence
  SAMD9 targeting guide sequence portion
ucuggaccacauuuucuaugua

SEQ ID NO: 3372 - RNA, 22 nt, Artificial Sequence
  SAMD9 targeting guide sequence portion
ugcccuuucaggauauucugga

SEQ ID NO: 3373 - RNA, 22 nt, Artificial Sequence
  SAMD9 targeting guide sequence portion
uggaccacauuuucuauguauu

SEQ ID NO: 3374 - RNA, 22 nt, Artificial Sequence
  SAMD9 targeting guide sequence portion
ugguccagaauauccugaaagg

SEQ ID NO: 3375 - RNA, 22 nt, Artificial Sequence
  SAMD9 targeting guide sequence portion
ugugguccagaauauccugaaa

SEQ ID NO: 3376 - RNA, 22 nt, Artificial Sequence
  SAMD9 targeting guide sequence portion
uucaggauauucuggaccacau

SEQ ID NO: 3377 - RNA, 22 nt, Artificial Sequence
  SAMD9 targeting guide sequence portion
uucugcccuuucaggauauucu

SEQ ID NO: 3378 - RNA, 22 nt, Artificial Sequence
  SAMD9 targeting guide sequence portion
uucuggaccacauuuucuaugu

SEQ ID NO: 3379 - RNA, 22 nt, Artificial Sequence
  SAMD9 targeting guide sequence portion
uuucaggauauucuggaccaca

SEQ ID NO: 3380 - RNA, 20 nt, Artificial Sequence
  SAMD9 targeting guide sequence portion
aaauuguaugaagaucacaa

SEQ ID NO: 3381 - RNA, 20 nt, Artificial Sequence
  SAMD9 targeting guide sequence portion
aagaucacaaaauccugaaa

SEQ ID NO: 3382 - RNA, 20 nt, Artificial Sequence
  SAMD9 targeting guide sequence portion
aauuguaugaagaucacaaa

SEQ ID NO: 3383 - RNA, 20 nt, Artificial Sequence
  SAMD9 targeting guide sequence portion
acuuuuuucaggauuuugug

SEQ ID NO: 3384 - RNA, 20 nt, Artificial Sequence
  SAMD9 targeting guide sequence portion
aggauuuugugaucuucaua

SEQ ID NO: 3385 - RNA, 20 nt, Artificial Sequence
  SAMD9 targeting guide sequence portion
auccuaaauuguaugaagau

SEQ ID NO: 3386 - RNA, 20 nt, Artificial Sequence
  SAMD9 targeting guide sequence portion
aucuucauacaauuuaggau

SEQ ID NO: 3387 - RNA, 20 nt, Artificial Sequence
  SAMD9 targeting guide sequence portion
augaagaucacaaaauccug

SEQ ID NO: 3388 - RNA, 20 nt, Artificial Sequence
  SAMD9 targeting guide sequence portion
auuauccuaaauuguaugaa

SEQ ID NO: 3389 - RNA, 20 nt, Artificial Sequence
  SAMD9 targeting guide sequence portion
auuguaugaagaucacaaaa

SEQ ID NO: 3390 - RNA, 20 nt, Artificial Sequence
  SAMD9 targeting guide sequence portion
auuuugugaucuucauacaa

SEQ ID NO: 3391 - RNA, 20 nt, Artificial Sequence
  SAMD9 targeting guide sequence portion
cacuuuuuucaggauuuugu

SEQ ID NO: 3392 - RNA, 20 nt, Artificial Sequence
  SAMD9 targeting guide sequence portion
caggauuuugugaucuucau

SEQ ID NO: 3393 - RNA, 20 nt, Artificial Sequence
  SAMD9 targeting guide sequence portion
ccuaaauuguaugaagauca

SEQ ID NO: 3394 - RNA, 20 nt, Artificial Sequence
  SAMD9 targeting guide sequence portion
cuaaauuguaugaagaucac

SEQ ID NO: 3395 - RNA, 20 nt, Artificial Sequence
  SAMD9 targeting guide sequence portion
cuucauacaauuuaggauaa

SEQ ID NO: 3396 - RNA, 20 nt, Artificial Sequence
  SAMD9 targeting guide sequence portion
cuuuuuucaggauuuuguga

SEQ ID NO: 3397 - RNA, 20 nt, Artificial Sequence
  SAMD9 targeting guide sequence portion
gaagaucacaaaauccugaa

SEQ ID NO: 3398 - RNA, 20 nt, Artificial Sequence
  SAMD9 targeting guide sequence portion
gaucuucauacaauuuagga

SEQ ID NO: 3399 - RNA, 20 nt, Artificial Sequence
  SAMD9 targeting guide sequence portion
gauuauccuaaauuguauga

SEQ ID NO: 3400 - RNA, 20 nt, Artificial Sequence
  SAMD9 targeting guide sequence portion
gauuuugugaucuucauaca

SEQ ID NO: 3401 - RNA, 20 nt, Artificial Sequence
  SAMD9 targeting guide sequence portion
ggauuuugugaucuucauac

SEQ ID NO: 3402 - RNA, 20 nt, Artificial Sequence
  SAMD9 targeting guide sequence portion
ggugauuauccuaaauugua

SEQ ID NO: 3403 - RNA, 20 nt, Artificial Sequence
  SAMD9 targeting guide sequence portion
guaugaagaucacaaaaucc

SEQ ID NO: 3404 - RNA, 20 nt, Artificial Sequence
  SAMD9 targeting guide sequence portion
gugaucuucauacaauuuag

SEQ ID NO: 3405 - RNA, 20 nt, Artificial Sequence
  SAMD9 targeting guide sequence portion
gugauuauccuaaauuguau

SEQ ID NO: 3406 - RNA, 20 nt, Artificial Sequence
  SAMD9 targeting guide sequence portion
uaaauuguaugaagaucaca

SEQ ID NO: 3407 - RNA, 20 nt, Artificial Sequence
  SAMD9 targeting guide sequence portion
uauccuaaauuguaugaaga

SEQ ID NO: 3408 - RNA, 20 nt, Artificial Sequence
  SAMD9 targeting guide sequence portion
uaugaagaucacaaaauccu

SEQ ID NO: 3409 - RNA, 20 nt, Artificial Sequence
  SAMD9 targeting guide sequence portion
ucaggauuuugugaucuuca

SEQ ID NO: 3410 - RNA, 20 nt, Artificial Sequence
  SAMD9 targeting guide sequence portion
uccuaaauuguaugaagauc

SEQ ID NO: 3411 - RNA, 20 nt, Artificial Sequence
  SAMD9 targeting guide sequence portion
ucuucauacaauuuaggaua

SEQ ID NO: 3412 - RNA, 20 nt, Artificial Sequence
  SAMD9 targeting guide sequence portion
ugaagaucacaaaauccuga

SEQ ID NO: 3413 - RNA, 20 nt, Artificial Sequence
  SAMD9 targeting guide sequence portion
ugaucuucauacaauuuagg

SEQ ID NO: 3414 - RNA, 20 nt, Artificial Sequence
  SAMD9 targeting guide sequence portion
ugauuauccuaaauuguaug

SEQ ID NO: 3415 - RNA, 20 nt, Artificial Sequence
  SAMD9 targeting guide sequence portion
uggugauuauccuaaauugu

SEQ ID NO: 3416 - RNA, 20 nt, Artificial Sequence
  SAMD9 targeting guide sequence portion
uguaugaagaucacaaaauc

SEQ ID NO: 3417 - RNA, 20 nt, Artificial Sequence
  SAMD9 targeting guide sequence portion
ugugaucuucauacaauuua

SEQ ID NO: 3418 - RNA, 20 nt, Artificial Sequence
  SAMD9 targeting guide sequence portion
uuauccuaaauuguaugaag

SEQ ID NO: 3419 - RNA, 20 nt, Artificial Sequence
  SAMD9 targeting guide sequence portion
uucaggauuuugugaucuuc

SEQ ID NO: 3420 - RNA, 20 nt, Artificial Sequence
  SAMD9 targeting guide sequence portion
uuguaugaagaucacaaaau

SEQ ID NO: 3421 - RNA, 20 nt, Artificial Sequence
  SAMD9 targeting guide sequence portion
uugugaucuucauacaauuu

SEQ ID NO: 3422 - RNA, 20 nt, Artificial Sequence
  SAMD9 targeting guide sequence portion
uuucaggauuuugugaucuu

SEQ ID NO: 3423 - RNA, 20 nt, Artificial Sequence
  SAMD9 targeting guide sequence portion
uuugugaucuucauacaauu

SEQ ID NO: 3424 - RNA, 20 nt, Artificial Sequence
  SAMD9 targeting guide sequence portion
uuuucaggauuuugugaucu

SEQ ID NO: 3425 - RNA, 20 nt, Artificial Sequence
  SAMD9 targeting guide sequence portion
uuuugugaucuucauacaau

SEQ ID NO: 3426 - RNA, 20 nt, Artificial Sequence
  SAMD9 targeting guide sequence portion
uuuuucaggauuuugugauc

SEQ ID NO: 3427 - RNA, 20 nt, Artificial Sequence
  SAMD9 targeting guide sequence portion
uuuuuucaggauuuugugau

SEQ ID NO: 3428 - RNA, 21 nt, Artificial Sequence
  SAMD9 targeting guide sequence portion
aaauuguaugaagaucacaaa

SEQ ID NO: 3429 - RNA, 21 nt, Artificial Sequence
  SAMD9 targeting guide sequence portion
aagaucacaaaauccugaaaa

SEQ ID NO: 3430 - RNA, 21 nt, Artificial Sequence
  SAMD9 targeting guide sequence portion
aauuguaugaagaucacaaaa

SEQ ID NO: 3431 - RNA, 21 nt, Artificial Sequence
  SAMD9 targeting guide sequence portion
acuuuuuucaggauuuuguga

SEQ ID NO: 3432 - RNA, 21 nt, Artificial Sequence
  SAMD9 targeting guide sequence portion
aggauuuugugaucuucauac

SEQ ID NO: 3433 - RNA, 21 nt, Artificial Sequence
  SAMD9 targeting guide sequence portion
auccuaaauuguaugaagauc

SEQ ID NO: 3434 - RNA, 21 nt, Artificial Sequence
  SAMD9 targeting guide sequence portion
aucuucauacaauuuaggaua

SEQ ID NO: 3435 - RNA, 21 nt, Artificial Sequence
  SAMD9 targeting guide sequence portion
augaagaucacaaaauccuga

SEQ ID NO: 3436 - RNA, 21 nt, Artificial Sequence
  SAMD9 targeting guide sequence portion
auuauccuaaauuguaugaag

SEQ ID NO: 3437 - RNA, 21 nt, Artificial Sequence
  SAMD9 targeting guide sequence portion
auuguaugaagaucacaaaau

SEQ ID NO: 3438 - RNA, 21 nt, Artificial Sequence
  SAMD9 targeting guide sequence portion
auuuugugaucuucauacaau

SEQ ID NO: 3439 - RNA, 21 nt, Artificial Sequence
  SAMD9 targeting guide sequence portion
cacuuuuuucaggauuuugug

SEQ ID NO: 3440 - RNA, 21 nt, Artificial Sequence
  SAMD9 targeting guide sequence portion
caggauuuugugaucuucaua

SEQ ID NO: 3441 - RNA, 21 nt, Artificial Sequence
  SAMD9 targeting guide sequence portion
ccuaaauuguaugaagaucac

SEQ ID NO: 3442 - RNA, 21 nt, Artificial Sequence
  SAMD9 targeting guide sequence portion
cuaaauuguaugaagaucaca

SEQ ID NO: 3443 - RNA, 21 nt, Artificial Sequence
  SAMD9 targeting guide sequence portion
cuggugauuauccuaaauugu

SEQ ID NO: 3444 - RNA, 21 nt, Artificial Sequence
  SAMD9 targeting guide sequence portion
cuucauacaauuuaggauaau

SEQ ID NO: 3445 - RNA, 21 nt, Artificial Sequence
  SAMD9 targeting guide sequence portion
cuuuuuucaggauuuugugau

SEQ ID NO: 3446 - RNA, 21 nt, Artificial Sequence
  SAMD9 targeting guide sequence portion
gaagaucacaaaauccugaaa

SEQ ID NO: 3447 - RNA, 21 nt, Artificial Sequence
  SAMD9 targeting guide sequence portion
gaucuucauacaauuuaggau

SEQ ID NO: 3448 - RNA, 21 nt, Artificial Sequence
  SAMD9 targeting guide sequence portion
gauuauccuaaauuguaugaa

SEQ ID NO: 3449 - RNA, 21 nt, Artificial Sequence
  SAMD9 targeting guide sequence portion
gauuuugugaucuucauacaa

SEQ ID NO: 3450 - RNA, 21 nt, Artificial Sequence
  SAMD9 targeting guide sequence portion
gcacuuuuuucaggauuuugu

SEQ ID NO: 3451 - RNA, 21 nt, Artificial Sequence
  SAMD9 targeting guide sequence portion
ggauuuugugaucuucauaca

SEQ ID NO: 3452 - RNA, 21 nt, Artificial Sequence
  SAMD9 targeting guide sequence portion
ggugauuauccuaaauuguau

SEQ ID NO: 3453 - RNA, 21 nt, Artificial Sequence
  SAMD9 targeting guide sequence portion
guaugaagaucacaaaauccu

SEQ ID NO: 3454 - RNA, 21 nt, Artificial Sequence
  SAMD9 targeting guide sequence portion
gugaucuucauacaauuuagg

SEQ ID NO: 3455 - RNA, 21 nt, Artificial Sequence
  SAMD9 targeting guide sequence portion
gugauuauccuaaauuguaug

SEQ ID NO: 3456 - RNA, 21 nt, Artificial Sequence
  SAMD9 targeting guide sequence portion
uaaauuguaugaagaucacaa

SEQ ID NO: 3457 - RNA, 21 nt, Artificial Sequence
  SAMD9 targeting guide sequence portion
uauccuaaauuguaugaagau

SEQ ID NO: 3458 - RNA, 21 nt, Artificial Sequence
  SAMD9 targeting guide sequence portion
uaugaagaucacaaaauccug

SEQ ID NO: 3459 - RNA, 21 nt, Artificial Sequence
  SAMD9 targeting guide sequence portion
ucaggauuuugugaucuucau

SEQ ID NO: 3460 - RNA, 21 nt, Artificial Sequence
  SAMD9 targeting guide sequence portion
uccuaaauuguaugaagauca

SEQ ID NO: 3461 - RNA, 21 nt, Artificial Sequence
  SAMD9 targeting guide sequence portion
ucuucauacaauuuaggauaa

SEQ ID NO: 3462 - RNA, 21 nt, Artificial Sequence
  SAMD9 targeting guide sequence portion
ugaagaucacaaaauccugaa

SEQ ID NO: 3463 - RNA, 21 nt, Artificial Sequence
  SAMD9 targeting guide sequence portion
ugaucuucauacaauuuagga

SEQ ID NO: 3464 - RNA, 21 nt, Artificial Sequence
  SAMD9 targeting guide sequence portion
ugauuauccuaaauuguauga

SEQ ID NO: 3465 - RNA, 21 nt, Artificial Sequence
  SAMD9 targeting guide sequence portion
uggugauuauccuaaauugua

SEQ ID NO: 3466 - RNA, 21 nt, Artificial Sequence
  SAMD9 targeting guide sequence portion
uguaugaagaucacaaaaucc

SEQ ID NO: 3467 - RNA, 21 nt, Artificial Sequence
  SAMD9 targeting guide sequence portion
ugugaucuucauacaauuuag

SEQ ID NO: 3468 - RNA, 21 nt, Artificial Sequence
  SAMD9 targeting guide sequence portion
uuauccuaaauuguaugaaga

SEQ ID NO: 3469 - RNA, 21 nt, Artificial Sequence
  SAMD9 targeting guide sequence portion
uucaggauuuugugaucuuca

SEQ ID NO: 3470 - RNA, 21 nt, Artificial Sequence
  SAMD9 targeting guide sequence portion
uuguaugaagaucacaaaauc

SEQ ID NO: 3471 - RNA, 21 nt, Artificial Sequence
  SAMD9 targeting guide sequence portion
uugugaucuucauacaauuua

SEQ ID NO: 3472 - RNA, 21 nt, Artificial Sequence
  SAMD9 targeting guide sequence portion
uuucaggauuuugugaucuuc

SEQ ID NO: 3473 - RNA, 21 nt, Artificial Sequence
  SAMD9 targeting guide sequence portion
uuugugaucuucauacaauuu

SEQ ID NO: 3474 - RNA, 21 nt, Artificial Sequence
  SAMD9 targeting guide sequence portion
uuuucaggauuuugugaucuu

SEQ ID NO: 3475 - RNA, 21 nt, Artificial Sequence
  SAMD9 targeting guide sequence portion
uuuugugaucuucauacaauu

SEQ ID NO: 3476 - RNA, 21 nt, Artificial Sequence
  SAMD9 targeting guide sequence portion
uuuuucaggauuuugugaucu

SEQ ID NO: 3477 - RNA, 21 nt, Artificial Sequence
  SAMD9 targeting guide sequence portion
uuuuuucaggauuuugugauc

SEQ ID NO: 3478 - RNA, 22 nt, Artificial Sequence
  SAMD9 targeting guide sequence portion
aaauuguaugaagaucacaaaa

SEQ ID NO: 3479 - RNA, 22 nt, Artificial Sequence
  SAMD9 targeting guide sequence portion
aagaucacaaaauccugaaaaa

SEQ ID NO: 3480 - RNA, 22 nt, Artificial Sequence
  SAMD9 targeting guide sequence portion
aauuguaugaagaucacaaaau

SEQ ID NO: 3481 - RNA, 22 nt, Artificial Sequence
  SAMD9 targeting guide sequence portion
acuuuuuucaggauuuugugau

SEQ ID NO: 3482 - RNA, 22 nt, Artificial Sequence
  SAMD9 targeting guide sequence portion
aggauuuugugaucuucauaca

SEQ ID NO: 3483 - RNA, 22 nt, Artificial Sequence
  SAMD9 targeting guide sequence portion
auccuaaauuguaugaagauca

SEQ ID NO: 3484 - RNA, 22 nt, Artificial Sequence
  SAMD9 targeting guide sequence portion
aucuucauacaauuuaggauaa

SEQ ID NO: 3485 - RNA, 22 nt, Artificial Sequence
  SAMD9 targeting guide sequence portion
augaagaucacaaaauccugaa

SEQ ID NO: 3486 - RNA, 22 nt, Artificial Sequence
  SAMD9 targeting guide sequence portion
auuauccuaaauuguaugaaga

SEQ ID NO: 3487 - RNA, 22 nt, Artificial Sequence
  SAMD9 targeting guide sequence portion
auuguaugaagaucacaaaauc

SEQ ID NO: 3488 - RNA, 22 nt, Artificial Sequence
  SAMD9 targeting guide sequence portion
auuuugugaucuucauacaauu

SEQ ID NO: 3489 - RNA, 22 nt, Artificial Sequence
  SAMD9 targeting guide sequence portion
cacuuuuuucaggauuuuguga

SEQ ID NO: 3490 - RNA, 22 nt, Artificial Sequence
  SAMD9 targeting guide sequence portion
caggauuuugugaucuucauac

SEQ ID NO: 3491 - RNA, 22 nt, Artificial Sequence
  SAMD9 targeting guide sequence portion
ccuaaauuguaugaagaucaca

SEQ ID NO: 3492 - RNA, 22 nt, Artificial Sequence
  SAMD9 targeting guide sequence portion
cuaaauuguaugaagaucacaa

SEQ ID NO: 3493 - RNA, 22 nt, Artificial Sequence
  SAMD9 targeting guide sequence portion
cuggugauuauccuaaauugua

SEQ ID NO: 3494 - RNA, 22 nt, Artificial Sequence
  SAMD9 targeting guide sequence portion
cuucauacaauuuaggauaauc

SEQ ID NO: 3495 - RNA, 22 nt, Artificial Sequence
  SAMD9 targeting guide sequence portion
cuuuuuucaggauuuugugauc

SEQ ID NO: 3496 - RNA, 22 nt, Artificial Sequence
  SAMD9 targeting guide sequence portion
gaagaucacaaaauccugaaaa

SEQ ID NO: 3497 - RNA, 22 nt, Artificial Sequence
  SAMD9 targeting guide sequence portion
gaucuucauacaauuuaggaua

SEQ ID NO: 3498 - RNA, 22 nt, Artificial Sequence
  SAMD9 targeting guide sequence portion
gauuauccuaaauuguaugaag

SEQ ID NO: 3499 - RNA, 22 nt, Artificial Sequence
  SAMD9 targeting guide sequence portion
gauuuugugaucuucauacaau

SEQ ID NO: 3500 - RNA, 22 nt, Artificial Sequence
  SAMD9 targeting guide sequence portion
gcacuuuuuucaggauuuugug

SEQ ID NO: 3501 - RNA, 22 nt, Artificial Sequence
  SAMD9 targeting guide sequence portion
ggauuuugugaucuucauacaa

SEQ ID NO: 3502 - RNA, 22 nt, Artificial Sequence
  SAMD9 targeting guide sequence portion
ggugauuauccuaaauuguaug

SEQ ID NO: 3503 - RNA, 22 nt, Artificial Sequence
  SAMD9 targeting guide sequence portion
guaugaagaucacaaaauccug

SEQ ID NO: 3504 - RNA, 22 nt, Artificial Sequence
  SAMD9 targeting guide sequence portion
gugaucuucauacaauuuagga

SEQ ID NO: 3505 - RNA, 22 nt, Artificial Sequence
  SAMD9 targeting guide sequence portion
gugauuauccuaaauuguauga

SEQ ID NO: 3506 - RNA, 22 nt, Artificial Sequence
  SAMD9 targeting guide sequence portion
uaaauuguaugaagaucacaaa

SEQ ID NO: 3507 - RNA, 22 nt, Artificial Sequence
  SAMD9 targeting guide sequence portion
uauccuaaauuguaugaagauc

SEQ ID NO: 3508 - RNA, 22 nt, Artificial Sequence
  SAMD9 targeting guide sequence portion
uaugaagaucacaaaauccuga

SEQ ID NO: 3509 - RNA, 22 nt, Artificial Sequence
  SAMD9 targeting guide sequence portion
ucaggauuuugugaucuucaua

SEQ ID NO: 3510 - RNA, 22 nt, Artificial Sequence
  SAMD9 targeting guide sequence portion
uccuaaauuguaugaagaucac

SEQ ID NO: 3511 - RNA, 22 nt, Artificial Sequence
  SAMD9 targeting guide sequence portion
ucuggugauuauccuaaauugu

SEQ ID NO: 3512 - RNA, 22 nt, Artificial Sequence
  SAMD9 targeting guide sequence portion
ucuucauacaauuuaggauaau

SEQ ID NO: 3513 - RNA, 22 nt, Artificial Sequence
  SAMD9 targeting guide sequence portion
ugaagaucacaaaauccugaaa

SEQ ID NO: 3514 - RNA, 22 nt, Artificial Sequence
  SAMD9 targeting guide sequence portion
ugaucuucauacaauuuaggau

SEQ ID NO: 3515 - RNA, 22 nt, Artificial Sequence
  SAMD9 targeting guide sequence portion
ugauuauccuaaauuguaugaa

SEQ ID NO: 3516 - RNA, 22 nt, Artificial Sequence
  SAMD9 targeting guide sequence portion
ugcacuuuuuucaggauuuugu

SEQ ID NO: 3517 - RNA, 22 nt, Artificial Sequence
  SAMD9 targeting guide sequence portion
uggugauuauccuaaauuguau

SEQ ID NO: 3518 - RNA, 22 nt, Artificial Sequence
  SAMD9 targeting guide sequence portion
uguaugaagaucacaaaauccu

SEQ ID NO: 3519 - RNA, 22 nt, Artificial Sequence
  SAMD9 targeting guide sequence portion
ugugaucuucauacaauuuagg

SEQ ID NO: 3520 - RNA, 22 nt, Artificial Sequence
  SAMD9 targeting guide sequence portion
uuauccuaaauuguaugaagau

SEQ ID NO: 3521 - RNA, 22 nt, Artificial Sequence
  SAMD9 targeting guide sequence portion
uucaggauuuugugaucuucau

SEQ ID NO: 3522 - RNA, 22 nt, Artificial Sequence
  SAMD9 targeting guide sequence portion
uuguaugaagaucacaaaaucc

SEQ ID NO: 3523 - RNA, 22 nt, Artificial Sequence
  SAMD9 targeting guide sequence portion
uugugaucuucauacaauuuag

SEQ ID NO: 3524 - RNA, 22 nt, Artificial Sequence
  SAMD9 targeting guide sequence portion
uuucaggauuuugugaucuuca

SEQ ID NO: 3525 - RNA, 22 nt, Artificial Sequence
  SAMD9 targeting guide sequence portion
uuugugaucuucauacaauuua

SEQ ID NO: 3526 - RNA, 22 nt, Artificial Sequence
  SAMD9 targeting guide sequence portion
uuuucaggauuuugugaucuuc

SEQ ID NO: 3527 - RNA, 22 nt, Artificial Sequence
  SAMD9 targeting guide sequence portion
uuuugugaucuucauacaauuu

SEQ ID NO: 3528 - RNA, 22 nt, Artificial Sequence
  SAMD9 targeting guide sequence portion
uuuuucaggauuuugugaucuu

SEQ ID NO: 3529 - RNA, 22 nt, Artificial Sequence
  SAMD9 targeting guide sequence portion
uuuuuucaggauuuugugaucu

SEQ ID NO: 3530 - RNA, 20 nt, Artificial Sequence
  SAMD9 targeting guide sequence portion
aaaaaccucuggugauuauc

SEQ ID NO: 3531 - RNA, 20 nt, Artificial Sequence
  SAMD9 targeting guide sequence portion
aaaaccucuggugauuaucc

SEQ ID NO: 3532 - RNA, 20 nt, Artificial Sequence
  SAMD9 targeting guide sequence portion
aaaccucuggugauuauccu

SEQ ID NO: 3533 - RNA, 20 nt, Artificial Sequence
  SAMD9 targeting guide sequence portion
aaccucuggugauuauccua

SEQ ID NO: 3534 - RNA, 20 nt, Artificial Sequence
  SAMD9 targeting guide sequence portion
aauauaggauaaucaccaga

SEQ ID NO: 3535 - RNA, 20 nt, Artificial Sequence
  SAMD9 targeting guide sequence portion
acaauauaggauaaucacca

SEQ ID NO: 3536 - RNA, 20 nt, Artificial Sequence
  SAMD9 targeting guide sequence portion
accucuggugauuauccuau

SEQ ID NO: 3537 - RNA, 20 nt, Artificial Sequence
  SAMD9 targeting guide sequence portion
aggauuuugugaucucauac

SEQ ID NO: 3538 - RNA, 20 nt, Artificial Sequence
  SAMD9 targeting guide sequence portion
auacaauauaggauaaucac

SEQ ID NO: 3539 - RNA, 20 nt, Artificial Sequence
  SAMD9 targeting guide sequence portion
auaggauaaucaccagaggu

SEQ ID NO: 3540 - RNA, 20 nt, Artificial Sequence
  SAMD9 targeting guide sequence portion
auauaggauaaucaccagag

SEQ ID NO: 3541 - RNA, 20 nt, Artificial Sequence
  SAMD9 targeting guide sequence portion
auauuguaugagaucacaaa

SEQ ID NO: 3542 - RNA, 20 nt, Artificial Sequence
  SAMD9 targeting guide sequence portion
auccuauauuguaugagauc

SEQ ID NO: 3543 - RNA, 20 nt, Artificial Sequence
  SAMD9 targeting guide sequence portion
aucucauacaauauaggaua

SEQ ID NO: 3544 - RNA, 20 nt, Artificial Sequence
  SAMD9 targeting guide sequence portion
auuauccuauauuguaugag

SEQ ID NO: 3545 - RNA, 20 nt, Artificial Sequence
  SAMD9 targeting guide sequence portion
auuuugugaucucauacaau

SEQ ID NO: 3546 - RNA, 20 nt, Artificial Sequence
  SAMD9 targeting guide sequence portion
caauauaggauaaucaccag

SEQ ID NO: 3547 - RNA, 20 nt, Artificial Sequence
  SAMD9 targeting guide sequence portion
caggauuuugugaucucaua

SEQ ID NO: 3548 - RNA, 20 nt, Artificial Sequence
  SAMD9 targeting guide sequence portion
cauacaauauaggauaauca

SEQ ID NO: 3549 - RNA, 20 nt, Artificial Sequence
  SAMD9 targeting guide sequence portion
ccuauauuguaugagaucac

SEQ ID NO: 3550 - RNA, 20 nt, Artificial Sequence
  SAMD9 targeting guide sequence portion
ccucuggugauuauccuaua

SEQ ID NO: 3551 - RNA, 20 nt, Artificial Sequence
  SAMD9 targeting guide sequence portion
cuauauuguaugagaucaca

SEQ ID NO: 3552 - RNA, 20 nt, Artificial Sequence
  SAMD9 targeting guide sequence portion
cucauacaauauaggauaau

SEQ ID NO: 3553 - RNA, 20 nt, Artificial Sequence
  SAMD9 targeting guide sequence portion
cucuggugauuauccuauau

SEQ ID NO: 3554 - RNA, 20 nt, Artificial Sequence
  SAMD9 targeting guide sequence portion
cuggugauuauccuauauug

SEQ ID NO: 3555 - RNA, 20 nt, Artificial Sequence
  SAMD9 targeting guide sequence portion
gaaaaaccucuggugauuau

SEQ ID NO: 3556 - RNA, 20 nt, Artificial Sequence
  SAMD9 targeting guide sequence portion
gaucucauacaauauaggau

SEQ ID NO: 3557 - RNA, 20 nt, Artificial Sequence
  SAMD9 targeting guide sequence portion
gauuauccuauauuguauga

SEQ ID NO: 3558 - RNA, 20 nt, Artificial Sequence
  SAMD9 targeting guide sequence portion
gauuuugugaucucauacaa

SEQ ID NO: 3559 - RNA, 20 nt, Artificial Sequence
  SAMD9 targeting guide sequence portion
ggauuuugugaucucauaca

SEQ ID NO: 3560 - RNA, 20 nt, Artificial Sequence
  SAMD9 targeting guide sequence portion
ggugauuauccuauauugua

SEQ ID NO: 3561 - RNA, 20 nt, Artificial Sequence
  SAMD9 targeting guide sequence portion
gugaucucauacaauauagg

SEQ ID NO: 3562 - RNA, 20 nt, Artificial Sequence
  SAMD9 targeting guide sequence portion
gugauuauccuauauuguau

SEQ ID NO: 3563 - RNA, 20 nt, Artificial Sequence
  SAMD9 targeting guide sequence portion
uacaauauaggauaaucacc

SEQ ID NO: 3564 - RNA, 20 nt, Artificial Sequence
  SAMD9 targeting guide sequence portion
uauaggauaaucaccagagg

SEQ ID NO: 3565 - RNA, 20 nt, Artificial Sequence
  SAMD9 targeting guide sequence portion
uauauuguaugagaucacaa

SEQ ID NO: 3566 - RNA, 20 nt, Artificial Sequence
  SAMD9 targeting guide sequence portion
uauccuauauuguaugagau

SEQ ID NO: 3567 - RNA, 20 nt, Artificial Sequence
  SAMD9 targeting guide sequence portion
uauuguaugagaucacaaaa

SEQ ID NO: 3568 - RNA, 20 nt, Artificial Sequence
  SAMD9 targeting guide sequence portion
ucaggauuuugugaucucau

SEQ ID NO: 3569 - RNA, 20 nt, Artificial Sequence
  SAMD9 targeting guide sequence portion
ucauacaauauaggauaauc

SEQ ID NO: 3570 - RNA, 20 nt, Artificial Sequence
  SAMD9 targeting guide sequence portion
uccuauauuguaugagauca

SEQ ID NO: 3571 - RNA, 20 nt, Artificial Sequence
  SAMD9 targeting guide sequence portion
ucucauacaauauaggauaa

SEQ ID NO: 3572 - RNA, 20 nt, Artificial Sequence
  SAMD9 targeting guide sequence portion
ucuggugauuauccuauauu

SEQ ID NO: 3573 - RNA, 20 nt, Artificial Sequence
  SAMD9 targeting guide sequence portion
ugaaaaaccucuggugauua

SEQ ID NO: 3574 - RNA, 20 nt, Artificial Sequence
  SAMD9 targeting guide sequence portion
ugaucucauacaauauagga

SEQ ID NO: 3575 - RNA, 20 nt, Artificial Sequence
  SAMD9 targeting guide sequence portion
ugauuauccuauauuguaug

SEQ ID NO: 3576 - RNA, 20 nt, Artificial Sequence
  SAMD9 targeting guide sequence portion
uggugauuauccuauauugu

SEQ ID NO: 3577 - RNA, 20 nt, Artificial Sequence
  SAMD9 targeting guide sequence portion
ugugaucucauacaauauag

SEQ ID NO: 3578 - RNA, 20 nt, Artificial Sequence
  SAMD9 targeting guide sequence portion
uuauccuauauuguaugaga

SEQ ID NO: 3579 - RNA, 20 nt, Artificial Sequence
  SAMD9 targeting guide sequence portion
uugugaucucauacaauaua

SEQ ID NO: 3580 - RNA, 20 nt, Artificial Sequence
  SAMD9 targeting guide sequence portion
uuugugaucucauacaauau

SEQ ID NO: 3581 - RNA, 20 nt, Artificial Sequence
  SAMD9 targeting guide sequence portion
uuuugugaucucauacaaua

SEQ ID NO: 3582 - RNA, 21 nt, Artificial Sequence
  SAMD9 targeting guide sequence portion
aaaaaccucuggugauuaucc

SEQ ID NO: 3583 - RNA, 21 nt, Artificial Sequence
  SAMD9 targeting guide sequence portion
aaaaccucuggugauuauccu

SEQ ID NO: 3584 - RNA, 21 nt, Artificial Sequence
  SAMD9 targeting guide sequence portion
aaaccucuggugauuauccua

SEQ ID NO: 3585 - RNA, 21 nt, Artificial Sequence
  SAMD9 targeting guide sequence portion
aaccucuggugauuauccuau

SEQ ID NO: 3586 - RNA, 21 nt, Artificial Sequence
  SAMD9 targeting guide sequence portion
aauauaggauaaucaccagag

SEQ ID NO: 3587 - RNA, 21 nt, Artificial Sequence
  SAMD9 targeting guide sequence portion
acaauauaggauaaucaccag

SEQ ID NO: 3588 - RNA, 21 nt, Artificial Sequence
  SAMD9 targeting guide sequence portion
accucuggugauuauccuaua

SEQ ID NO: 3589 - RNA, 21 nt, Artificial Sequence
  SAMD9 targeting guide sequence portion
aggauuuugugaucucauaca

SEQ ID NO: 3590 - RNA, 21 nt, Artificial Sequence
  SAMD9 targeting guide sequence portion
auacaauauaggauaaucacc

SEQ ID NO: 3591 - RNA, 21 nt, Artificial Sequence
  SAMD9 targeting guide sequence portion
auaggauaaucaccagagguu

SEQ ID NO: 3592 - RNA, 21 nt, Artificial Sequence
  SAMD9 targeting guide sequence portion
auauaggauaaucaccagagg

SEQ ID NO: 3593 - RNA, 21 nt, Artificial Sequence
  SAMD9 targeting guide sequence portion
auauuguaugagaucacaaaa

SEQ ID NO: 3594 - RNA, 21 nt, Artificial Sequence
  SAMD9 targeting guide sequence portion
auccuauauuguaugagauca

SEQ ID NO: 3595 - RNA, 21 nt, Artificial Sequence
  SAMD9 targeting guide sequence portion
aucucauacaauauaggauaa

SEQ ID NO: 3596 - RNA, 21 nt, Artificial Sequence
  SAMD9 targeting guide sequence portion
augaaaaaccucuggugauua

SEQ ID NO: 3597 - RNA, 21 nt, Artificial Sequence
  SAMD9 targeting guide sequence portion
auuauccuauauuguaugaga

SEQ ID NO: 3598 - RNA, 21 nt, Artificial Sequence
  SAMD9 targeting guide sequence portion
auuuugugaucucauacaaua

SEQ ID NO: 3599 - RNA, 21 nt, Artificial Sequence
  SAMD9 targeting guide sequence portion
caauauaggauaaucaccaga

SEQ ID NO: 3600 - RNA, 21 nt, Artificial Sequence
  SAMD9 targeting guide sequence portion
caggauuuugugaucucauac

SEQ ID NO: 3601 - RNA, 21 nt, Artificial Sequence
  SAMD9 targeting guide sequence portion
cauacaauauaggauaaucac

SEQ ID NO: 3602 - RNA, 21 nt, Artificial Sequence
  SAMD9 targeting guide sequence portion
ccuauauuguaugagaucaca

SEQ ID NO: 3603 - RNA, 21 nt, Artificial Sequence
  SAMD9 targeting guide sequence portion
ccucuggugauuauccuauau

SEQ ID NO: 3604 - RNA, 21 nt, Artificial Sequence
  SAMD9 targeting guide sequence portion
cuauauuguaugagaucacaa

SEQ ID NO: 3605 - RNA, 21 nt, Artificial Sequence
  SAMD9 targeting guide sequence portion
cucauacaauauaggauaauc

SEQ ID NO: 3606 - RNA, 21 nt, Artificial Sequence
  SAMD9 targeting guide sequence portion
cucuggugauuauccuauauu

SEQ ID NO: 3607 - RNA, 21 nt, Artificial Sequence
  SAMD9 targeting guide sequence portion
cuggugauuauccuauauugu

SEQ ID NO: 3608 - RNA, 21 nt, Artificial Sequence
  SAMD9 targeting guide sequence portion
gaaaaaccucuggugauuauc

SEQ ID NO: 3609 - RNA, 21 nt, Artificial Sequence
  SAMD9 targeting guide sequence portion
gaucucauacaauauaggaua

SEQ ID NO: 3610 - RNA, 21 nt, Artificial Sequence
  SAMD9 targeting guide sequence portion
gauuauccuauauuguaugag

SEQ ID NO: 3611 - RNA, 21 nt, Artificial Sequence
  SAMD9 targeting guide sequence portion
gauuuugugaucucauacaau

SEQ ID NO: 3612 - RNA, 21 nt, Artificial Sequence
  SAMD9 targeting guide sequence portion
ggauuuugugaucucauacaa

SEQ ID NO: 3613 - RNA, 21 nt, Artificial Sequence
  SAMD9 targeting guide sequence portion
ggugauuauccuauauuguau

SEQ ID NO: 3614 - RNA, 21 nt, Artificial Sequence
  SAMD9 targeting guide sequence portion
gugaucucauacaauauagga

SEQ ID NO: 3615 - RNA, 21 nt, Artificial Sequence
  SAMD9 targeting guide sequence portion
gugauuauccuauauuguaug

SEQ ID NO: 3616 - RNA, 21 nt, Artificial Sequence
  SAMD9 targeting guide sequence portion
uacaauauaggauaaucacca

SEQ ID NO: 3617 - RNA, 21 nt, Artificial Sequence
  SAMD9 targeting guide sequence portion
uauaggauaaucaccagaggu

SEQ ID NO: 3618 - RNA, 21 nt, Artificial Sequence
  SAMD9 targeting guide sequence portion
uauauuguaugagaucacaaa

SEQ ID NO: 3619 - RNA, 21 nt, Artificial Sequence
  SAMD9 targeting guide sequence portion
uauccuauauuguaugagauc

SEQ ID NO: 3620 - RNA, 21 nt, Artificial Sequence
  SAMD9 targeting guide sequence portion
uauuguaugagaucacaaaau

SEQ ID NO: 3621 - RNA, 21 nt, Artificial Sequence
  SAMD9 targeting guide sequence portion
ucaggauuuugugaucucaua

SEQ ID NO: 3622 - RNA, 21 nt, Artificial Sequence
  SAMD9 targeting guide sequence portion
ucauacaauauaggauaauca

SEQ ID NO: 3623 - RNA, 21 nt, Artificial Sequence
  SAMD9 targeting guide sequence portion
uccuauauuguaugagaucac

SEQ ID NO: 3624 - RNA, 21 nt, Artificial Sequence
  SAMD9 targeting guide sequence portion
ucucauacaauauaggauaau

SEQ ID NO: 3625 - RNA, 21 nt, Artificial Sequence
  SAMD9 targeting guide sequence portion
ucuggugauuauccuauauug

SEQ ID NO: 3626 - RNA, 21 nt, Artificial Sequence
  SAMD9 targeting guide sequence portion
ugaaaaaccucuggugauuau

SEQ ID NO: 3627 - RNA, 21 nt, Artificial Sequence
  SAMD9 targeting guide sequence portion
ugaucucauacaauauaggau

SEQ ID NO: 3628 - RNA, 21 nt, Artificial Sequence
  SAMD9 targeting guide sequence portion
ugauuauccuauauuguauga

SEQ ID NO: 3629 - RNA, 21 nt, Artificial Sequence
  SAMD9 targeting guide sequence portion
uggugauuauccuauauugua

SEQ ID NO: 3630 - RNA, 21 nt, Artificial Sequence
  SAMD9 targeting guide sequence portion
ugugaucucauacaauauagg

SEQ ID NO: 3631 - RNA, 21 nt, Artificial Sequence
  SAMD9 targeting guide sequence portion
uuauccuauauuguaugagau

SEQ ID NO: 3632 - RNA, 21 nt, Artificial Sequence
  SAMD9 targeting guide sequence portion
uucaggauuuugugaucucau

SEQ ID NO: 3633 - RNA, 21 nt, Artificial Sequence
  SAMD9 targeting guide sequence portion
uugugaucucauacaauauag

SEQ ID NO: 3634 - RNA, 21 nt, Artificial Sequence
  SAMD9 targeting guide sequence portion
uuugugaucucauacaauaua

SEQ ID NO: 3635 - RNA, 21 nt, Artificial Sequence
  SAMD9 targeting guide sequence portion
uuuugugaucucauacaauau

SEQ ID NO: 3636 - RNA, 22 nt, Artificial Sequence
  SAMD9 targeting guide sequence portion
aaaaaccucuggugauuauccu

SEQ ID NO: 3637 - RNA, 22 nt, Artificial Sequence
  SAMD9 targeting guide sequence portion
aaaaccucuggugauuauccua

SEQ ID NO: 3638 - RNA, 22 nt, Artificial Sequence
  SAMD9 targeting guide sequence portion
aaaccucuggugauuauccuau

SEQ ID NO: 3639 - RNA, 22 nt, Artificial Sequence
  SAMD9 targeting guide sequence portion
aaccucuggugauuauccuaua

SEQ ID NO: 3640 - RNA, 22 nt, Artificial Sequence
  SAMD9 targeting guide sequence portion
aauauaggauaaucaccagagg

SEQ ID NO: 3641 - RNA, 22 nt, Artificial Sequence
  SAMD9 targeting guide sequence portion
acaauauaggauaaucaccaga

SEQ ID NO: 3642 - RNA, 22 nt, Artificial Sequence
  SAMD9 targeting guide sequence portion
accucuggugauuauccuauau

SEQ ID NO: 3643 - RNA, 22 nt, Artificial Sequence
  SAMD9 targeting guide sequence portion
aggauuuugugaucucauacaa

SEQ ID NO: 3644 - RNA, 22 nt, Artificial Sequence
  SAMD9 targeting guide sequence portion
auacaauauaggauaaucacca

SEQ ID NO: 3645 - RNA, 22 nt, Artificial Sequence
  SAMD9 targeting guide sequence portion
auaggauaaucaccagagguuu

SEQ ID NO: 3646 - RNA, 22 nt, Artificial Sequence
  SAMD9 targeting guide sequence portion
auauaggauaaucaccagaggu

SEQ ID NO: 3647 - RNA, 22 nt, Artificial Sequence
  SAMD9 targeting guide sequence portion
auauuguaugagaucacaaaau

SEQ ID NO: 3648 - RNA, 22 nt, Artificial Sequence
  SAMD9 targeting guide sequence portion
auccuauauuguaugagaucac

SEQ ID NO: 3649 - RNA, 22 nt, Artificial Sequence
  SAMD9 targeting guide sequence portion
aucucauacaauauaggauaau

SEQ ID NO: 3650 - RNA, 22 nt, Artificial Sequence
  SAMD9 targeting guide sequence portion
augaaaaaccucuggugauuau

SEQ ID NO: 3651 - RNA, 22 nt, Artificial Sequence
  SAMD9 targeting guide sequence portion
auuauccuauauuguaugagau

SEQ ID NO: 3652 - RNA, 22 nt, Artificial Sequence
  SAMD9 targeting guide sequence portion
auuuugugaucucauacaauau

SEQ ID NO: 3653 - RNA, 22 nt, Artificial Sequence
  SAMD9 targeting guide sequence portion
caauauaggauaaucaccagag

SEQ ID NO: 3654 - RNA, 22 nt, Artificial Sequence
  SAMD9 targeting guide sequence portion
caggauuuugugaucucauaca

SEQ ID NO: 3655 - RNA, 22 nt, Artificial Sequence
  SAMD9 targeting guide sequence portion
cauacaauauaggauaaucacc

SEQ ID NO: 3656 - RNA, 22 nt, Artificial Sequence
  SAMD9 targeting guide sequence portion
ccuauauuguaugagaucacaa

SEQ ID NO: 3657 - RNA, 22 nt, Artificial Sequence
  SAMD9 targeting guide sequence portion
ccucuggugauuauccuauauu

SEQ ID NO: 3658 - RNA, 22 nt, Artificial Sequence
  SAMD9 targeting guide sequence portion
cuauauuguaugagaucacaaa

SEQ ID NO: 3659 - RNA, 22 nt, Artificial Sequence
  SAMD9 targeting guide sequence portion
cucauacaauauaggauaauca

SEQ ID NO: 3660 - RNA, 22 nt, Artificial Sequence
  SAMD9 targeting guide sequence portion
cucuggugauuauccuauauug

SEQ ID NO: 3661 - RNA, 22 nt, Artificial Sequence
  SAMD9 targeting guide sequence portion
cuggugauuauccuauauugua

SEQ ID NO: 3662 - RNA, 22 nt, Artificial Sequence
  SAMD9 targeting guide sequence portion
gaaaaaccucuggugauuaucc

SEQ ID NO: 3663 - RNA, 22 nt, Artificial Sequence
  SAMD9 targeting guide sequence portion
gaucucauacaauauaggauaa

SEQ ID NO: 3664 - RNA, 22 nt, Artificial Sequence
  SAMD9 targeting guide sequence portion
gauuauccuauauuguaugaga

SEQ ID NO: 3665 - RNA, 22 nt, Artificial Sequence
  SAMD9 targeting guide sequence portion
gauuuugugaucucauacaaua

SEQ ID NO: 3666 - RNA, 22 nt, Artificial Sequence
  SAMD9 targeting guide sequence portion
ggauuuugugaucucauacaau

SEQ ID NO: 3667 - RNA, 22 nt, Artificial Sequence
  SAMD9 targeting guide sequence portion
ggugauuauccuauauuguaug

SEQ ID NO: 3668 - RNA, 22 nt, Artificial Sequence
  SAMD9 targeting guide sequence portion
gugaucucauacaauauaggau

SEQ ID NO: 3669 - RNA, 22 nt, Artificial Sequence
  SAMD9 targeting guide sequence portion
gugauuauccuauauuguauga

SEQ ID NO: 3670 - RNA, 22 nt, Artificial Sequence
  SAMD9 targeting guide sequence portion
uacaauauaggauaaucaccag

SEQ ID NO: 3671 - RNA, 22 nt, Artificial Sequence
  SAMD9 targeting guide sequence portion
uauaggauaaucaccagagguu

SEQ ID NO: 3672 - RNA, 22 nt, Artificial Sequence
  SAMD9 targeting guide sequence portion
uauauuguaugagaucacaaaa

SEQ ID NO: 3673 - RNA, 22 nt, Artificial Sequence
  SAMD9 targeting guide sequence portion
uauccuauauuguaugagauca

SEQ ID NO: 3674 - RNA, 22 nt, Artificial Sequence
  SAMD9 targeting guide sequence portion
uaugaaaaaccucuggugauua

SEQ ID NO: 3675 - RNA, 22 nt, Artificial Sequence
  SAMD9 targeting guide sequence portion
uauuguaugagaucacaaaauc

SEQ ID NO: 3676 - RNA, 22 nt, Artificial Sequence
  SAMD9 targeting guide sequence portion
ucaggauuuugugaucucauac

SEQ ID NO: 3677 - RNA, 22 nt, Artificial Sequence
  SAMD9 targeting guide sequence portion
ucauacaauauaggauaaucac

SEQ ID NO: 3678 - RNA, 22 nt, Artificial Sequence
  SAMD9 targeting guide sequence portion
uccuauauuguaugagaucaca

SEQ ID NO: 3679 - RNA, 22 nt, Artificial Sequence
  SAMD9 targeting guide sequence portion
ucucauacaauauaggauaauc

SEQ ID NO: 3680 - RNA, 22 nt, Artificial Sequence
  SAMD9 targeting guide sequence portion
ucuggugauuauccuauauugu

SEQ ID NO: 3681 - RNA, 22 nt, Artificial Sequence
  SAMD9 targeting guide sequence portion
ugaaaaaccucuggugauuauc

SEQ ID NO: 3682 - RNA, 22 nt, Artificial Sequence
  SAMD9 targeting guide sequence portion
ugaucucauacaauauaggaua

SEQ ID NO: 3683 - RNA, 22 nt, Artificial Sequence
  SAMD9 targeting guide sequence portion
ugauuauccuauauuguaugag

SEQ ID NO: 3684 - RNA, 22 nt, Artificial Sequence
  SAMD9 targeting guide sequence portion
uggugauuauccuauauuguau

SEQ ID NO: 3685 - RNA, 22 nt, Artificial Sequence
  SAMD9 targeting guide sequence portion
ugugaucucauacaauauagga

SEQ ID NO: 3686 - RNA, 22 nt, Artificial Sequence
  SAMD9 targeting guide sequence portion
uuauccuauauuguaugagauc

SEQ ID NO: 3687 - RNA, 22 nt, Artificial Sequence
  SAMD9 targeting guide sequence portion
uucaggauuuugugaucucaua

SEQ ID NO: 3688 - RNA, 22 nt, Artificial Sequence
  SAMD9 targeting guide sequence portion
uugugaucucauacaauauagg

SEQ ID NO: 3689 - RNA, 22 nt, Artificial Sequence
  SAMD9 targeting guide sequence portion
uuucaggauuuugugaucucau

SEQ ID NO: 3690 - RNA, 22 nt, Artificial Sequence
  SAMD9 targeting guide sequence portion
uuugugaucucauacaauauag

SEQ ID NO: 3691 - RNA, 22 nt, Artificial Sequence
  SAMD9 targeting guide sequence portion
uuuugugaucucauacaauaua

SEQ ID NO: 3692 - RNA, 20 nt, Artificial Sequence
  SAMD9 targeting guide sequence portion
aaaaaguacauuugauauga

SEQ ID NO: 3693 - RNA, 20 nt, Artificial Sequence
  SAMD9 targeting guide sequence portion
aaaaguacauuugauaugaa

SEQ ID NO: 3694 - RNA, 20 nt, Artificial Sequence
  SAMD9 targeting guide sequence portion
aaaguacauuugauaugaaa

SEQ ID NO: 3695 - RNA, 20 nt, Artificial Sequence
  SAMD9 targeting guide sequence portion
aaauguacuuuuuagcuaua

SEQ ID NO: 3696 - RNA, 20 nt, Artificial Sequence
  SAMD9 targeting guide sequence portion
aacagcuauagcuaaaaagu

SEQ ID NO: 3697 - RNA, 20 nt, Artificial Sequence
  SAMD9 targeting guide sequence portion
aaguacauuugauaugaaaa

SEQ ID NO: 3698 - RNA, 20 nt, Artificial Sequence
  SAMD9 targeting guide sequence portion
aaucaccagagguuuuucau

SEQ ID NO: 3699 - RNA, 20 nt, Artificial Sequence
  SAMD9 targeting guide sequence portion
acagcuauagcuaaaaagua

SEQ ID NO: 3700 - RNA, 20 nt, Artificial Sequence
  SAMD9 targeting guide sequence portion
acauuugauaugaaaaaccu

SEQ ID NO: 3701 - RNA, 20 nt, Artificial Sequence
  SAMD9 targeting guide sequence portion
accagagguuuuucauauca

SEQ ID NO: 3702 - RNA, 20 nt, Artificial Sequence
  SAMD9 targeting guide sequence portion
agagguuuuucauaucaaau

SEQ ID NO: 3703 - RNA, 20 nt, Artificial Sequence
  SAMD9 targeting guide sequence portion
agcuaaaaaguacauuugau

SEQ ID NO: 3704 - RNA, 20 nt, Artificial Sequence
  SAMD9 targeting guide sequence portion
agcuauagcuaaaaaguaca

SEQ ID NO: 3705 - RNA, 20 nt, Artificial Sequence
  SAMD9 targeting guide sequence portion
agguuuuucauaucaaaugu

SEQ ID NO: 3706 - RNA, 20 nt, Artificial Sequence
  SAMD9 targeting guide sequence portion
aguacauuugauaugaaaaa

SEQ ID NO: 3707 - RNA, 20 nt, Artificial Sequence
  SAMD9 targeting guide sequence portion
auaaucaccagagguuuuuc

SEQ ID NO: 3708 - RNA, 20 nt, Artificial Sequence
  SAMD9 targeting guide sequence portion
auagcuaaaaaguacauuug

SEQ ID NO: 3709 - RNA, 20 nt, Artificial Sequence
  SAMD9 targeting guide sequence portion
auaucaaauguacuuuuuag

SEQ ID NO: 3710 - RNA, 20 nt, Artificial Sequence
  SAMD9 targeting guide sequence portion
aucaaauguacuuuuuagcu

SEQ ID NO: 3711 - RNA, 20 nt, Artificial Sequence
  SAMD9 targeting guide sequence portion
aucaccagagguuuuucaua

SEQ ID NO: 3712 - RNA, 20 nt, Artificial Sequence
  SAMD9 targeting guide sequence portion
auuugauaugaaaaaccucu

SEQ ID NO: 3713 - RNA, 20 nt, Artificial Sequence
  SAMD9 targeting guide sequence portion
caaauguacuuuuuagcuau

SEQ ID NO: 3714 - RNA, 20 nt, Artificial Sequence
  SAMD9 targeting guide sequence portion
caccagagguuuuucauauc

SEQ ID NO: 3715 - RNA, 20 nt, Artificial Sequence
  SAMD9 targeting guide sequence portion
cagagguuuuucauaucaaa

SEQ ID NO: 3716 - RNA, 20 nt, Artificial Sequence
  SAMD9 targeting guide sequence portion
cagcuauagcuaaaaaguac

SEQ ID NO: 3717 - RNA, 20 nt, Artificial Sequence
  SAMD9 targeting guide sequence portion
cauaucaaauguacuuuuua

SEQ ID NO: 3718 - RNA, 20 nt, Artificial Sequence
  SAMD9 targeting guide sequence portion
cauuugauaugaaaaaccuc

SEQ ID NO: 3719 - RNA, 20 nt, Artificial Sequence
  SAMD9 targeting guide sequence portion
ccagagguuuuucauaucaa

SEQ ID NO: 3720 - RNA, 20 nt, Artificial Sequence
  SAMD9 targeting guide sequence portion
cuaaaaaguacauuugauau

SEQ ID NO: 3721 - RNA, 20 nt, Artificial Sequence
  SAMD9 targeting guide sequence portion
cuauagcuaaaaaguacauu

SEQ ID NO: 3722 - RNA, 20 nt, Artificial Sequence
  SAMD9 targeting guide sequence portion
gagguuuuucauaucaaaug

SEQ ID NO: 3723 - RNA, 20 nt, Artificial Sequence
  SAMD9 targeting guide sequence portion
gcuaaaaaguacauuugaua

SEQ ID NO: 3724 - RNA, 20 nt, Artificial Sequence
  SAMD9 targeting guide sequence portion
gcuauagcuaaaaaguacau

SEQ ID NO: 3725 - RNA, 20 nt, Artificial Sequence
  SAMD9 targeting guide sequence portion
gguuuuucauaucaaaugua

SEQ ID NO: 3726 - RNA, 20 nt, Artificial Sequence
  SAMD9 targeting guide sequence portion
guacauuugauaugaaaaac

SEQ ID NO: 3727 - RNA, 20 nt, Artificial Sequence
  SAMD9 targeting guide sequence portion
guuuuucauaucaaauguac

SEQ ID NO: 3728 - RNA, 20 nt, Artificial Sequence
  SAMD9 targeting guide sequence portion
uaaaaaguacauuugauaug

SEQ ID NO: 3729 - RNA, 20 nt, Artificial Sequence
  SAMD9 targeting guide sequence portion
uaaucaccagagguuuuuca

SEQ ID NO: 3730 - RNA, 20 nt, Artificial Sequence
  SAMD9 targeting guide sequence portion
uacauuugauaugaaaaacc

SEQ ID NO: 3731 - RNA, 20 nt, Artificial Sequence
  SAMD9 targeting guide sequence portion
uagcuaaaaaguacauuuga

SEQ ID NO: 3732 - RNA, 20 nt, Artificial Sequence
  SAMD9 targeting guide sequence portion
uauagcuaaaaaguacauuu

SEQ ID NO: 3733 - RNA, 20 nt, Artificial Sequence
  SAMD9 targeting guide sequence portion
uaucaaauguacuuuuuagc

SEQ ID NO: 3734 - RNA, 20 nt, Artificial Sequence
  SAMD9 targeting guide sequence portion
ucaaauguacuuuuuagcua

SEQ ID NO: 3735 - RNA, 20 nt, Artificial Sequence
  SAMD9 targeting guide sequence portion
ucaccagagguuuuucauau

SEQ ID NO: 3736 - RNA, 20 nt, Artificial Sequence
  SAMD9 targeting guide sequence portion
ucauaucaaauguacuuuuu

SEQ ID NO: 3737 - RNA, 20 nt, Artificial Sequence
  SAMD9 targeting guide sequence portion
ugauaugaaaaaccucuggu

SEQ ID NO: 3738 - RNA, 20 nt, Artificial Sequence
  SAMD9 targeting guide sequence portion
uucauaucaaauguacuuuu

SEQ ID NO: 3739 - RNA, 20 nt, Artificial Sequence
  SAMD9 targeting guide sequence portion
uugauaugaaaaaccucugg

SEQ ID NO: 3740 - RNA, 20 nt, Artificial Sequence
  SAMD9 targeting guide sequence portion
uuucauaucaaauguacuuu

SEQ ID NO: 3741 - RNA, 20 nt, Artificial Sequence
  SAMD9 targeting guide sequence portion
uuugauaugaaaaaccucug

SEQ ID NO: 3742 - RNA, 20 nt, Artificial Sequence
  SAMD9 targeting guide sequence portion
uuuucauaucaaauguacuu

SEQ ID NO: 3743 - RNA, 20 nt, Artificial Sequence
  SAMD9 targeting guide sequence portion
uuuuucauaucaaauguacu

SEQ ID NO: 3744 - RNA, 21 nt, Artificial Sequence
  SAMD9 targeting guide sequence portion
aaacagcuauagcuaaaaagu

SEQ ID NO: 3745 - RNA, 21 nt, Artificial Sequence
  SAMD9 targeting guide sequence portion
aaauguacuuuuuagcuauag

SEQ ID NO: 3746 - RNA, 21 nt, Artificial Sequence
  SAMD9 targeting guide sequence portion
aacagcuauagcuaaaaagua

SEQ ID NO: 3747 - RNA, 21 nt, Artificial Sequence
  SAMD9 targeting guide sequence portion
aaucaccagagguuuuucaua

SEQ ID NO: 3748 - RNA, 21 nt, Artificial Sequence
  SAMD9 targeting guide sequence portion
acagcuauagcuaaaaaguac

SEQ ID NO: 3749 - RNA, 21 nt, Artificial Sequence
  SAMD9 targeting guide sequence portion
acauuugauaugaaaaaccuc

SEQ ID NO: 3750 - RNA, 21 nt, Artificial Sequence
  SAMD9 targeting guide sequence portion
accagagguuuuucauaucaa

SEQ ID NO: 3751 - RNA, 21 nt, Artificial Sequence
  SAMD9 targeting guide sequence portion
agagguuuuucauaucaaaug

SEQ ID NO: 3752 - RNA, 21 nt, Artificial Sequence
  SAMD9 targeting guide sequence portion
agcuaaaaaguacauuugaua

SEQ ID NO: 3753 - RNA, 21 nt, Artificial Sequence
  SAMD9 targeting guide sequence portion
agcuauagcuaaaaaguacau

SEQ ID NO: 3754 - RNA, 21 nt, Artificial Sequence
  SAMD9 targeting guide sequence portion
agguuuuucauaucaaaugua

SEQ ID NO: 3755 - RNA, 21 nt, Artificial Sequence
  SAMD9 targeting guide sequence portion
aguacauuugauaugaaaaac

SEQ ID NO: 3756 - RNA, 21 nt, Artificial Sequence
  SAMD9 targeting guide sequence portion
auaaucaccagagguuuuuca

SEQ ID NO: 3757 - RNA, 21 nt, Artificial Sequence
  SAMD9 targeting guide sequence portion
auagcuaaaaaguacauuuga

SEQ ID NO: 3758 - RNA, 21 nt, Artificial Sequence
  SAMD9 targeting guide sequence portion
auaucaaauguacuuuuuagc

SEQ ID NO: 3759 - RNA, 21 nt, Artificial Sequence
  SAMD9 targeting guide sequence portion
aucaaauguacuuuuuagcua

SEQ ID NO: 3760 - RNA, 21 nt, Artificial Sequence
  SAMD9 targeting guide sequence portion
aucaccagagguuuuucauau

SEQ ID NO: 3761 - RNA, 21 nt, Artificial Sequence
  SAMD9 targeting guide sequence portion
auuugauaugaaaaaccucug

SEQ ID NO: 3762 - RNA, 21 nt, Artificial Sequence
  SAMD9 targeting guide sequence portion
caaauguacuuuuuagcuaua

SEQ ID NO: 3763 - RNA, 21 nt, Artificial Sequence
  SAMD9 targeting guide sequence portion
caccagagguuuuucauauca

SEQ ID NO: 3764 - RNA, 21 nt, Artificial Sequence
  SAMD9 targeting guide sequence portion
cagagguuuuucauaucaaau

SEQ ID NO: 3765 - RNA, 21 nt, Artificial Sequence
  SAMD9 targeting guide sequence portion
cagcuauagcuaaaaaguaca

SEQ ID NO: 3766 - RNA, 21 nt, Artificial Sequence
  SAMD9 targeting guide sequence portion
cauaucaaauguacuuuuuag

SEQ ID NO: 3767 - RNA, 21 nt, Artificial Sequence
  SAMD9 targeting guide sequence portion
cauuugauaugaaaaaccucu

SEQ ID NO: 3768 - RNA, 21 nt, Artificial Sequence
  SAMD9 targeting guide sequence portion
ccagagguuuuucauaucaaa

SEQ ID NO: 3769 - RNA, 21 nt, Artificial Sequence
  SAMD9 targeting guide sequence portion
cuaaaaaguacauuugauaug

SEQ ID NO: 3770 - RNA, 21 nt, Artificial Sequence
  SAMD9 targeting guide sequence portion
cuauagcuaaaaaguacauuu

SEQ ID NO: 3771 - RNA, 21 nt, Artificial Sequence
  SAMD9 targeting guide sequence portion
gagguuuuucauaucaaaugu

SEQ ID NO: 3772 - RNA, 21 nt, Artificial Sequence
  SAMD9 targeting guide sequence portion
gauaaucaccagagguuuuuc

SEQ ID NO: 3773 - RNA, 21 nt, Artificial Sequence
  SAMD9 targeting guide sequence portion
gcuaaaaaguacauuugauau

SEQ ID NO: 3774 - RNA, 21 nt, Artificial Sequence
  SAMD9 targeting guide sequence portion
gcuauagcuaaaaaguacauu

SEQ ID NO: 3775 - RNA, 21 nt, Artificial Sequence
  SAMD9 targeting guide sequence portion
gguuuuucauaucaaauguac

SEQ ID NO: 3776 - RNA, 21 nt, Artificial Sequence
  SAMD9 targeting guide sequence portion
guacauuugauaugaaaaacc

SEQ ID NO: 3777 - RNA, 21 nt, Artificial Sequence
  SAMD9 targeting guide sequence portion
guuuuucauaucaaauguacu

SEQ ID NO: 3778 - RNA, 21 nt, Artificial Sequence
  SAMD9 targeting guide sequence portion
uaaucaccagagguuuuucau

SEQ ID NO: 3779 - RNA, 21 nt, Artificial Sequence
  SAMD9 targeting guide sequence portion
uacauuugauaugaaaaaccu

SEQ ID NO: 3780 - RNA, 21 nt, Artificial Sequence
  SAMD9 targeting guide sequence portion
uagcuaaaaaguacauuugau

SEQ ID NO: 3781 - RNA, 21 nt, Artificial Sequence
  SAMD9 targeting guide sequence portion
uauagcuaaaaaguacauuug

SEQ ID NO: 3782 - RNA, 21 nt, Artificial Sequence
  SAMD9 targeting guide sequence portion
uaucaaauguacuuuuuagcu

SEQ ID NO: 3783 - RNA, 21 nt, Artificial Sequence
  SAMD9 targeting guide sequence portion
ucaaauguacuuuuuagcuau

SEQ ID NO: 3784 - RNA, 21 nt, Artificial Sequence
  SAMD9 targeting guide sequence portion
ucaccagagguuuuucauauc

SEQ ID NO: 3785 - RNA, 21 nt, Artificial Sequence
  SAMD9 targeting guide sequence portion
ugauaugaaaaaccucuggug

SEQ ID NO: 3786 - RNA, 21 nt, Artificial Sequence
  SAMD9 targeting guide sequence portion
uugauaugaaaaaccucuggu

SEQ ID NO: 3787 - RNA, 21 nt, Artificial Sequence
  SAMD9 targeting guide sequence portion
uuugauaugaaaaaccucugg

SEQ ID NO: 3788 - RNA, 22 nt, Artificial Sequence
  SAMD9 targeting guide sequence portion
aaacagcuauagcuaaaaagua

SEQ ID NO: 3789 - RNA, 22 nt, Artificial Sequence
  SAMD9 targeting guide sequence portion
aaauguacuuuuuagcuauagc

SEQ ID NO: 3790 - RNA, 22 nt, Artificial Sequence
  SAMD9 targeting guide sequence portion
aacagcuauagcuaaaaaguac

SEQ ID NO: 3791 - RNA, 22 nt, Artificial Sequence
  SAMD9 targeting guide sequence portion
aaguacauuugauaugaaaaac

SEQ ID NO: 3792 - RNA, 22 nt, Artificial Sequence
  SAMD9 targeting guide sequence portion
aaucaccagagguuuuucauau

SEQ ID NO: 3793 - RNA, 22 nt, Artificial Sequence
  SAMD9 targeting guide sequence portion
acagcuauagcuaaaaaguaca

SEQ ID NO: 3794 - RNA, 22 nt, Artificial Sequence
  SAMD9 targeting guide sequence portion
acauuugauaugaaaaaccucu

SEQ ID NO: 3795 - RNA, 22 nt, Artificial Sequence
  SAMD9 targeting guide sequence portion
accagagguuuuucauaucaaa

SEQ ID NO: 3796 - RNA, 22 nt, Artificial Sequence
  SAMD9 targeting guide sequence portion
agagguuuuucauaucaaaugu

SEQ ID NO: 3797 - RNA, 22 nt, Artificial Sequence
  SAMD9 targeting guide sequence portion
agcuaaaaaguacauuugauau

SEQ ID NO: 3798 - RNA, 22 nt, Artificial Sequence
  SAMD9 targeting guide sequence portion
agcuauagcuaaaaaguacauu

SEQ ID NO: 3799 - RNA, 22 nt, Artificial Sequence
  SAMD9 targeting guide sequence portion
agguuuuucauaucaaauguac

SEQ ID NO: 3800 - RNA, 22 nt, Artificial Sequence
  SAMD9 targeting guide sequence portion
aguacauuugauaugaaaaacc

SEQ ID NO: 3801 - RNA, 22 nt, Artificial Sequence
  SAMD9 targeting guide sequence portion
auaaucaccagagguuuuucau

SEQ ID NO: 3802 - RNA, 22 nt, Artificial Sequence
  SAMD9 targeting guide sequence portion
auagcuaaaaaguacauuugau

SEQ ID NO: 3803 - RNA, 22 nt, Artificial Sequence
  SAMD9 targeting guide sequence portion
auaucaaauguacuuuuuagcu

SEQ ID NO: 3804 - RNA, 22 nt, Artificial Sequence
  SAMD9 targeting guide sequence portion
aucaaauguacuuuuuagcuau

SEQ ID NO: 3805 - RNA, 22 nt, Artificial Sequence
  SAMD9 targeting guide sequence portion
aucaccagagguuuuucauauc

SEQ ID NO: 3806 - RNA, 22 nt, Artificial Sequence
  SAMD9 targeting guide sequence portion
auuugauaugaaaaaccucugg

SEQ ID NO: 3807 - RNA, 22 nt, Artificial Sequence
  SAMD9 targeting guide sequence portion
caaacagcuauagcuaaaaagu

SEQ ID NO: 3808 - RNA, 22 nt, Artificial Sequence
  SAMD9 targeting guide sequence portion
caaauguacuuuuuagcuauag

SEQ ID NO: 3809 - RNA, 22 nt, Artificial Sequence
  SAMD9 targeting guide sequence portion
caccagagguuuuucauaucaa

SEQ ID NO: 3810 - RNA, 22 nt, Artificial Sequence
  SAMD9 targeting guide sequence portion
cagagguuuuucauaucaaaug

SEQ ID NO: 3811 - RNA, 22 nt, Artificial Sequence
  SAMD9 targeting guide sequence portion
cagcuauagcuaaaaaguacau

SEQ ID NO: 3812 - RNA, 22 nt, Artificial Sequence
  SAMD9 targeting guide sequence portion
cauaucaaauguacuuuuuagc

SEQ ID NO: 3813 - RNA, 22 nt, Artificial Sequence
  SAMD9 targeting guide sequence portion
cauuugauaugaaaaaccucug

SEQ ID NO: 3814 - RNA, 22 nt, Artificial Sequence
  SAMD9 targeting guide sequence portion
ccagagguuuuucauaucaaau

SEQ ID NO: 3815 - RNA, 22 nt, Artificial Sequence
  SAMD9 targeting guide sequence portion
cuaaaaaguacauuugauauga

SEQ ID NO: 3816 - RNA, 22 nt, Artificial Sequence
  SAMD9 targeting guide sequence portion
cuauagcuaaaaaguacauuug

SEQ ID NO: 3817 - RNA, 22 nt, Artificial Sequence
  SAMD9 targeting guide sequence portion
gagguuuuucauaucaaaugua

SEQ ID NO: 3818 - RNA, 22 nt, Artificial Sequence
  SAMD9 targeting guide sequence portion
gauaaucaccagagguuuuuca

SEQ ID NO: 3819 - RNA, 22 nt, Artificial Sequence
  SAMD9 targeting guide sequence portion
gcuaaaaaguacauuugauaug

SEQ ID NO: 3820 - RNA, 22 nt, Artificial Sequence
  SAMD9 targeting guide sequence portion
gcuauagcuaaaaaguacauuu

SEQ ID NO: 3821 - RNA, 22 nt, Artificial Sequence
  SAMD9 targeting guide sequence portion
ggauaaucaccagagguuuuuc

SEQ ID NO: 3822 - RNA, 22 nt, Artificial Sequence
  SAMD9 targeting guide sequence portion
gguuuuucauaucaaauguacu

SEQ ID NO: 3823 - RNA, 22 nt, Artificial Sequence
  SAMD9 targeting guide sequence portion
guacauuugauaugaaaaaccu

SEQ ID NO: 3824 - RNA, 22 nt, Artificial Sequence
  SAMD9 targeting guide sequence portion
guuuuucauaucaaauguacuu

SEQ ID NO: 3825 - RNA, 22 nt, Artificial Sequence
  SAMD9 targeting guide sequence portion
uaaucaccagagguuuuucaua

SEQ ID NO: 3826 - RNA, 22 nt, Artificial Sequence
  SAMD9 targeting guide sequence portion
uacauuugauaugaaaaaccuc

SEQ ID NO: 3827 - RNA, 22 nt, Artificial Sequence
  SAMD9 targeting guide sequence portion
uagcuaaaaaguacauuugaua

SEQ ID NO: 3828 - RNA, 22 nt, Artificial Sequence
  SAMD9 targeting guide sequence portion
uauagcuaaaaaguacauuuga

SEQ ID NO: 3829 - RNA, 22 nt, Artificial Sequence
  SAMD9 targeting guide sequence portion
uaucaaauguacuuuuuagcua

SEQ ID NO: 3830 - RNA, 22 nt, Artificial Sequence
  SAMD9 targeting guide sequence portion
ucaaauguacuuuuuagcuaua

SEQ ID NO: 3831 - RNA, 22 nt, Artificial Sequence
  SAMD9 targeting guide sequence portion
ucaccagagguuuuucauauca

SEQ ID NO: 3832 - RNA, 22 nt, Artificial Sequence
  SAMD9 targeting guide sequence portion
ucauaucaaauguacuuuuuag

SEQ ID NO: 3833 - RNA, 22 nt, Artificial Sequence
  SAMD9 targeting guide sequence portion
ugauaugaaaaaccucugguga

SEQ ID NO: 3834 - RNA, 22 nt, Artificial Sequence
  SAMD9 targeting guide sequence portion
uugauaugaaaaaccucuggug

SEQ ID NO: 3835 - RNA, 22 nt, Artificial Sequence
  SAMD9 targeting guide sequence portion
uuugauaugaaaaaccucuggu

SEQ ID NO: 3836 - RNA, 20 nt, Artificial Sequence
  SAMD9 targeting guide sequence portion
aacaagauaauaucuaucuu

SEQ ID NO: 3837 - RNA, 20 nt, Artificial Sequence
  SAMD9 targeting guide sequence portion
aagaacaagauaauaucuau

SEQ ID NO: 3838 - RNA, 20 nt, Artificial Sequence
  SAMD9 targeting guide sequence portion
aagauaauaucuaucuucug

SEQ ID NO: 3839 - RNA, 20 nt, Artificial Sequence
  SAMD9 targeting guide sequence portion
aagauagauauuaucuuguu

SEQ ID NO: 3840 - RNA, 20 nt, Artificial Sequence
  SAMD9 targeting guide sequence portion
aauagaguacugcagaagau

SEQ ID NO: 3841 - RNA, 20 nt, Artificial Sequence
  SAMD9 targeting guide sequence portion
aauaucuaucuucugcagua

SEQ ID NO: 3842 - RNA, 20 nt, Artificial Sequence
  SAMD9 targeting guide sequence portion
acaagauaauaucuaucuuc

SEQ ID NO: 3843 - RNA, 20 nt, Artificial Sequence
  SAMD9 targeting guide sequence portion
acugcagaagauagauauua

SEQ ID NO: 3844 - RNA, 20 nt, Artificial Sequence
  SAMD9 targeting guide sequence portion
agaacaagauaauaucuauc

SEQ ID NO: 3845 - RNA, 20 nt, Artificial Sequence
  SAMD9 targeting guide sequence portion
agaagauagauauuaucuug

SEQ ID NO: 3846 - RNA, 20 nt, Artificial Sequence
  SAMD9 targeting guide sequence portion
agaguacugcagaagauaga

SEQ ID NO: 3847 - RNA, 20 nt, Artificial Sequence
  SAMD9 targeting guide sequence portion
agauaauaucuaucuucugc

SEQ ID NO: 3848 - RNA, 20 nt, Artificial Sequence
  SAMD9 targeting guide sequence portion
agauagauauuaucuuguuc

SEQ ID NO: 3849 - RNA, 20 nt, Artificial Sequence
  SAMD9 targeting guide sequence portion
agauauuaucuuguucuuca

SEQ ID NO: 3850 - RNA, 20 nt, Artificial Sequence
  SAMD9 targeting guide sequence portion
aguacugcagaagauagaua

SEQ ID NO: 3851 - RNA, 20 nt, Artificial Sequence
  SAMD9 targeting guide sequence portion
auaauaucuaucuucugcag

SEQ ID NO: 3852 - RNA, 20 nt, Artificial Sequence
  SAMD9 targeting guide sequence portion
auagaguacugcagaagaua

SEQ ID NO: 3853 - RNA, 20 nt, Artificial Sequence
  SAMD9 targeting guide sequence portion
auagauauuaucuuguucuu

SEQ ID NO: 3854 - RNA, 20 nt, Artificial Sequence
  SAMD9 targeting guide sequence portion
auaucuaucuucugcaguac

SEQ ID NO: 3855 - RNA, 20 nt, Artificial Sequence
  SAMD9 targeting guide sequence portion
auauuaucuuguucuucaaa

SEQ ID NO: 3856 - RNA, 20 nt, Artificial Sequence
  SAMD9 targeting guide sequence portion
aucuaucuucugcaguacuc

SEQ ID NO: 3857 - RNA, 20 nt, Artificial Sequence
  SAMD9 targeting guide sequence portion
augauuuugaagaacaagau

SEQ ID NO: 3858 - RNA, 20 nt, Artificial Sequence
  SAMD9 targeting guide sequence portion
auuuugaagaacaagauaau

SEQ ID NO: 3859 - RNA, 20 nt, Artificial Sequence
  SAMD9 targeting guide sequence portion
caagauaauaucuaucuucu

SEQ ID NO: 3860 - RNA, 20 nt, Artificial Sequence
  SAMD9 targeting guide sequence portion
cagaagauagauauuaucuu

SEQ ID NO: 3861 - RNA, 20 nt, Artificial Sequence
  SAMD9 targeting guide sequence portion
cugcagaagauagauauuau

SEQ ID NO: 3862 - RNA, 20 nt, Artificial Sequence
  SAMD9 targeting guide sequence portion
gaacaagauaauaucuaucu

SEQ ID NO: 3863 - RNA, 20 nt, Artificial Sequence
  SAMD9 targeting guide sequence portion
gaagaacaagauaauaucua

SEQ ID NO: 3864 - RNA, 20 nt, Artificial Sequence
  SAMD9 targeting guide sequence portion
gaagauagauauuaucuugu

SEQ ID NO: 3865 - RNA, 20 nt, Artificial Sequence
  SAMD9 targeting guide sequence portion
gaauagaguacugcagaaga

SEQ ID NO: 3866 - RNA, 20 nt, Artificial Sequence
  SAMD9 targeting guide sequence portion
gaguacugcagaagauagau

SEQ ID NO: 3867 - RNA, 20 nt, Artificial Sequence
  SAMD9 targeting guide sequence portion
gauaauaucuaucuucugca

SEQ ID NO: 3868 - RNA, 20 nt, Artificial Sequence
  SAMD9 targeting guide sequence portion
gauagauauuaucuuguucu

SEQ ID NO: 3869 - RNA, 20 nt, Artificial Sequence
  SAMD9 targeting guide sequence portion
gauauuaucuuguucuucaa

SEQ ID NO: 3870 - RNA, 20 nt, Artificial Sequence
  SAMD9 targeting guide sequence portion
gaugauuuugaagaacaaga

SEQ ID NO: 3871 - RNA, 20 nt, Artificial Sequence
  SAMD9 targeting guide sequence portion
gauuuugaagaacaagauaa

SEQ ID NO: 3872 - RNA, 20 nt, Artificial Sequence
  SAMD9 targeting guide sequence portion
gcagaagauagauauuaucu

SEQ ID NO: 3873 - RNA, 20 nt, Artificial Sequence
  SAMD9 targeting guide sequence portion
guacugcagaagauagauau

SEQ ID NO: 3874 - RNA, 20 nt, Artificial Sequence
  SAMD9 targeting guide sequence portion
uaauaucuaucuucugcagu

SEQ ID NO: 3875 - RNA, 20 nt, Artificial Sequence
  SAMD9 targeting guide sequence portion
uacugcagaagauagauauu

SEQ ID NO: 3876 - RNA, 20 nt, Artificial Sequence
  SAMD9 targeting guide sequence portion
uagaguacugcagaagauag

SEQ ID NO: 3877 - RNA, 20 nt, Artificial Sequence
  SAMD9 targeting guide sequence portion
uagauauuaucuuguucuuc

SEQ ID NO: 3878 - RNA, 20 nt, Artificial Sequence
  SAMD9 targeting guide sequence portion
uaucuaucuucugcaguacu

SEQ ID NO: 3879 - RNA, 20 nt, Artificial Sequence
  SAMD9 targeting guide sequence portion
uauuaucuuguucuucaaaa

SEQ ID NO: 3880 - RNA, 20 nt, Artificial Sequence
  SAMD9 targeting guide sequence portion
ugaagaacaagauaauaucu

SEQ ID NO: 3881 - RNA, 20 nt, Artificial Sequence
  SAMD9 targeting guide sequence portion
ugaauagaguacugcagaag

SEQ ID NO: 3882 - RNA, 20 nt, Artificial Sequence
  SAMD9 targeting guide sequence portion
ugaugauuuugaagaacaag

SEQ ID NO: 3883 - RNA, 20 nt, Artificial Sequence
  SAMD9 targeting guide sequence portion
ugauuuugaagaacaagaua

SEQ ID NO: 3884 - RNA, 20 nt, Artificial Sequence
  SAMD9 targeting guide sequence portion
ugcagaagauagauauuauc

SEQ ID NO: 3885 - RNA, 20 nt, Artificial Sequence
  SAMD9 targeting guide sequence portion
uugaagaacaagauaauauc

SEQ ID NO: 3886 - RNA, 20 nt, Artificial Sequence
  SAMD9 targeting guide sequence portion
uuugaagaacaagauaauau

SEQ ID NO: 3887 - RNA, 20 nt, Artificial Sequence
  SAMD9 targeting guide sequence portion
uuuugaagaacaagauaaua

SEQ ID NO: 3888 - RNA, 21 nt, Artificial Sequence
  SAMD9 targeting guide sequence portion
aacaagauaauaucuaucuuc

SEQ ID NO: 3889 - RNA, 21 nt, Artificial Sequence
  SAMD9 targeting guide sequence portion
aagaacaagauaauaucuauc

SEQ ID NO: 3890 - RNA, 21 nt, Artificial Sequence
  SAMD9 targeting guide sequence portion
aagauaauaucuaucuucugc

SEQ ID NO: 3891 - RNA, 21 nt, Artificial Sequence
  SAMD9 targeting guide sequence portion
aagauagauauuaucuuguuc

SEQ ID NO: 3892 - RNA, 21 nt, Artificial Sequence
  SAMD9 targeting guide sequence portion
aauagaguacugcagaagaua

SEQ ID NO: 3893 - RNA, 21 nt, Artificial Sequence
  SAMD9 targeting guide sequence portion
aauaucuaucuucugcaguac

SEQ ID NO: 3894 - RNA, 21 nt, Artificial Sequence
  SAMD9 targeting guide sequence portion
acaagauaauaucuaucuucu

SEQ ID NO: 3895 - RNA, 21 nt, Artificial Sequence
  SAMD9 targeting guide sequence portion
acugcagaagauagauauuau

SEQ ID NO: 3896 - RNA, 21 nt, Artificial Sequence
  SAMD9 targeting guide sequence portion
agaacaagauaauaucuaucu

SEQ ID NO: 3897 - RNA, 21 nt, Artificial Sequence
  SAMD9 targeting guide sequence portion
agaagauagauauuaucuugu

SEQ ID NO: 3898 - RNA, 21 nt, Artificial Sequence
  SAMD9 targeting guide sequence portion
agaguacugcagaagauagau

SEQ ID NO: 3899 - RNA, 21 nt, Artificial Sequence
  SAMD9 targeting guide sequence portion
agauaauaucuaucuucugca

SEQ ID NO: 3900 - RNA, 21 nt, Artificial Sequence
  SAMD9 targeting guide sequence portion
agauagauauuaucuuguucu

SEQ ID NO: 3901 - RNA, 21 nt, Artificial Sequence
  SAMD9 targeting guide sequence portion
agauauuaucuuguucuucaa

SEQ ID NO: 3902 - RNA, 21 nt, Artificial Sequence
  SAMD9 targeting guide sequence portion
aguacugcagaagauagauau

SEQ ID NO: 3903 - RNA, 21 nt, Artificial Sequence
  SAMD9 targeting guide sequence portion
auaauaucuaucuucugcagu

SEQ ID NO: 3904 - RNA, 21 nt, Artificial Sequence
  SAMD9 targeting guide sequence portion
auagaguacugcagaagauag

SEQ ID NO: 3905 - RNA, 21 nt, Artificial Sequence
  SAMD9 targeting guide sequence portion
auagauauuaucuuguucuuc

SEQ ID NO: 3906 - RNA, 21 nt, Artificial Sequence
  SAMD9 targeting guide sequence portion
auaucuaucuucugcaguacu

SEQ ID NO: 3907 - RNA, 21 nt, Artificial Sequence
  SAMD9 targeting guide sequence portion
aucuaucuucugcaguacucu

SEQ ID NO: 3908 - RNA, 21 nt, Artificial Sequence
  SAMD9 targeting guide sequence portion
augauuuugaagaacaagaua

SEQ ID NO: 3909 - RNA, 21 nt, Artificial Sequence
  SAMD9 targeting guide sequence portion
caagauaauaucuaucuucug

SEQ ID NO: 3910 - RNA, 21 nt, Artificial Sequence
  SAMD9 targeting guide sequence portion
cagaagauagauauuaucuug

SEQ ID NO: 3911 - RNA, 21 nt, Artificial Sequence
  SAMD9 targeting guide sequence portion
cugcagaagauagauauuauc

SEQ ID NO: 3912 - RNA, 21 nt, Artificial Sequence
  SAMD9 targeting guide sequence portion
gaacaagauaauaucuaucuu

SEQ ID NO: 3913 - RNA, 21 nt, Artificial Sequence
  SAMD9 targeting guide sequence portion
gaagaacaagauaauaucuau

SEQ ID NO: 3914 - RNA, 21 nt, Artificial Sequence
  SAMD9 targeting guide sequence portion
gaagauagauauuaucuuguu

SEQ ID NO: 3915 - RNA, 21 nt, Artificial Sequence
  SAMD9 targeting guide sequence portion
gaauagaguacugcagaagau

SEQ ID NO: 3916 - RNA, 21 nt, Artificial Sequence
  SAMD9 targeting guide sequence portion
gaguacugcagaagauagaua

SEQ ID NO: 3917 - RNA, 21 nt, Artificial Sequence
  SAMD9 targeting guide sequence portion
gauaauaucuaucuucugcag

SEQ ID NO: 3918 - RNA, 21 nt, Artificial Sequence
  SAMD9 targeting guide sequence portion
gauagauauuaucuuguucuu

SEQ ID NO: 3919 - RNA, 21 nt, Artificial Sequence
  SAMD9 targeting guide sequence portion
gauauuaucuuguucuucaaa

SEQ ID NO: 3920 - RNA, 21 nt, Artificial Sequence
  SAMD9 targeting guide sequence portion
gaugauuuugaagaacaagau

SEQ ID NO: 3921 - RNA, 21 nt, Artificial Sequence
  SAMD9 targeting guide sequence portion
gauuuugaagaacaagauaau

SEQ ID NO: 3922 - RNA, 21 nt, Artificial Sequence
  SAMD9 targeting guide sequence portion
gcagaagauagauauuaucuu

SEQ ID NO: 3923 - RNA, 21 nt, Artificial Sequence
  SAMD9 targeting guide sequence portion
guacugcagaagauagauauu

SEQ ID NO: 3924 - RNA, 21 nt, Artificial Sequence
  SAMD9 targeting guide sequence portion
uaauaucuaucuucugcagua

SEQ ID NO: 3925 - RNA, 21 nt, Artificial Sequence
  SAMD9 targeting guide sequence portion
uacugcagaagauagauauua

SEQ ID NO: 3926 - RNA, 21 nt, Artificial Sequence
  SAMD9 targeting guide sequence portion
uagaguacugcagaagauaga

SEQ ID NO: 3927 - RNA, 21 nt, Artificial Sequence
  SAMD9 targeting guide sequence portion
uagauauuaucuuguucuuca

SEQ ID NO: 3928 - RNA, 21 nt, Artificial Sequence
  SAMD9 targeting guide sequence portion
uaucuaucuucugcaguacuc

SEQ ID NO: 3929 - RNA, 21 nt, Artificial Sequence
  SAMD9 targeting guide sequence portion
ugaagaacaagauaauaucua

SEQ ID NO: 3930 - RNA, 21 nt, Artificial Sequence
  SAMD9 targeting guide sequence portion
ugaauagaguacugcagaaga

SEQ ID NO: 3931 - RNA, 21 nt, Artificial Sequence
  SAMD9 targeting guide sequence portion
ugaugauuuugaagaacaaga

SEQ ID NO: 3932 - RNA, 21 nt, Artificial Sequence
  SAMD9 targeting guide sequence portion
ugauuuugaagaacaagauaa

SEQ ID NO: 3933 - RNA, 21 nt, Artificial Sequence
  SAMD9 targeting guide sequence portion
ugcagaagauagauauuaucu

SEQ ID NO: 3934 - RNA, 21 nt, Artificial Sequence
  SAMD9 targeting guide sequence portion
uugaagaacaagauaauaucu

SEQ ID NO: 3935 - RNA, 21 nt, Artificial Sequence
  SAMD9 targeting guide sequence portion
uugaauagaguacugcagaag

SEQ ID NO: 3936 - RNA, 21 nt, Artificial Sequence
  SAMD9 targeting guide sequence portion
uugaugauuuugaagaacaag

SEQ ID NO: 3937 - RNA, 21 nt, Artificial Sequence
  SAMD9 targeting guide sequence portion
uuugaagaacaagauaauauc

SEQ ID NO: 3938 - RNA, 22 nt, Artificial Sequence
  SAMD9 targeting guide sequence portion
aacaagauaauaucuaucuucu

SEQ ID NO: 3939 - RNA, 22 nt, Artificial Sequence
  SAMD9 targeting guide sequence portion
aagaacaagauaauaucuaucu

SEQ ID NO: 3940 - RNA, 22 nt, Artificial Sequence
  SAMD9 targeting guide sequence portion
aagauaauaucuaucuucugca

SEQ ID NO: 3941 - RNA, 22 nt, Artificial Sequence
  SAMD9 targeting guide sequence portion
aagauagauauuaucuuguucu

SEQ ID NO: 3942 - RNA, 22 nt, Artificial Sequence
  SAMD9 targeting guide sequence portion
aauagaguacugcagaagauag

SEQ ID NO: 3943 - RNA, 22 nt, Artificial Sequence
  SAMD9 targeting guide sequence portion
aauaucuaucuucugcaguacu

SEQ ID NO: 3944 - RNA, 22 nt, Artificial Sequence
  SAMD9 targeting guide sequence portion
acaagauaauaucuaucuucug

SEQ ID NO: 3945 - RNA, 22 nt, Artificial Sequence
  SAMD9 targeting guide sequence portion
acugcagaagauagauauuauc

SEQ ID NO: 3946 - RNA, 22 nt, Artificial Sequence
  SAMD9 targeting guide sequence portion
agaacaagauaauaucuaucuu

SEQ ID NO: 3947 - RNA, 22 nt, Artificial Sequence
  SAMD9 targeting guide sequence portion
agaagauagauauuaucuuguu

SEQ ID NO: 3948 - RNA, 22 nt, Artificial Sequence
  SAMD9 targeting guide sequence portion
agaguacugcagaagauagaua

SEQ ID NO: 3949 - RNA, 22 nt, Artificial Sequence
  SAMD9 targeting guide sequence portion
agauaauaucuaucuucugcag

SEQ ID NO: 3950 - RNA, 22 nt, Artificial Sequence
  SAMD9 targeting guide sequence portion
agauagauauuaucuuguucuu

SEQ ID NO: 3951 - RNA, 22 nt, Artificial Sequence
  SAMD9 targeting guide sequence portion
agauauuaucuuguucuucaaa

SEQ ID NO: 3952 - RNA, 22 nt, Artificial Sequence
  SAMD9 targeting guide sequence portion
aguacugcagaagauagauauu

SEQ ID NO: 3953 - RNA, 22 nt, Artificial Sequence
  SAMD9 targeting guide sequence portion
auaauaucuaucuucugcagua

SEQ ID NO: 3954 - RNA, 22 nt, Artificial Sequence
  SAMD9 targeting guide sequence portion
auagaguacugcagaagauaga

SEQ ID NO: 3955 - RNA, 22 nt, Artificial Sequence
  SAMD9 targeting guide sequence portion
auagauauuaucuuguucuuca

SEQ ID NO: 3956 - RNA, 22 nt, Artificial Sequence
  SAMD9 targeting guide sequence portion
auaucuaucuucugcaguacuc

SEQ ID NO: 3957 - RNA, 22 nt, Artificial Sequence
  SAMD9 targeting guide sequence portion
aucuaucuucugcaguacucua

SEQ ID NO: 3958 - RNA, 22 nt, Artificial Sequence
  SAMD9 targeting guide sequence portion
augauuuugaagaacaagauaa

SEQ ID NO: 3959 - RNA, 22 nt, Artificial Sequence
  SAMD9 targeting guide sequence portion
caagauaauaucuaucuucugc

SEQ ID NO: 3960 - RNA, 22 nt, Artificial Sequence
  SAMD9 targeting guide sequence portion
cagaagauagauauuaucuugu

SEQ ID NO: 3961 - RNA, 22 nt, Artificial Sequence
  SAMD9 targeting guide sequence portion
cugcagaagauagauauuaucu

SEQ ID NO: 3962 - RNA, 22 nt, Artificial Sequence
  SAMD9 targeting guide sequence portion
gaacaagauaauaucuaucuuc

SEQ ID NO: 3963 - RNA, 22 nt, Artificial Sequence
  SAMD9 targeting guide sequence portion
gaagaacaagauaauaucuauc

SEQ ID NO: 3964 - RNA, 22 nt, Artificial Sequence
  SAMD9 targeting guide sequence portion
gaagauagauauuaucuuguuc

SEQ ID NO: 3965 - RNA, 22 nt, Artificial Sequence
  SAMD9 targeting guide sequence portion
gaauagaguacugcagaagaua

SEQ ID NO: 3966 - RNA, 22 nt, Artificial Sequence
  SAMD9 targeting guide sequence portion
gaguacugcagaagauagauau

SEQ ID NO: 3967 - RNA, 22 nt, Artificial Sequence
  SAMD9 targeting guide sequence portion
gauaauaucuaucuucugcagu

SEQ ID NO: 3968 - RNA, 22 nt, Artificial Sequence
  SAMD9 targeting guide sequence portion
gauagauauuaucuuguucuuc

SEQ ID NO: 3969 - RNA, 22 nt, Artificial Sequence
  SAMD9 targeting guide sequence portion
gauauuaucuuguucuucaaaa

SEQ ID NO: 3970 - RNA, 22 nt, Artificial Sequence
  SAMD9 targeting guide sequence portion
gaugauuuugaagaacaagaua

SEQ ID NO: 3971 - RNA, 22 nt, Artificial Sequence
  SAMD9 targeting guide sequence portion
gauuuugaagaacaagauaaua

SEQ ID NO: 3972 - RNA, 22 nt, Artificial Sequence
  SAMD9 targeting guide sequence portion
gcagaagauagauauuaucuug

SEQ ID NO: 3973 - RNA, 22 nt, Artificial Sequence
  SAMD9 targeting guide sequence portion
guacugcagaagauagauauua

SEQ ID NO: 3974 - RNA, 22 nt, Artificial Sequence
  SAMD9 targeting guide sequence portion
guugaugauuuugaagaacaag

SEQ ID NO: 3975 - RNA, 22 nt, Artificial Sequence
  SAMD9 targeting guide sequence portion
uaauaucuaucuucugcaguac

SEQ ID NO: 3976 - RNA, 22 nt, Artificial Sequence
  SAMD9 targeting guide sequence portion
uacugcagaagauagauauuau

SEQ ID NO: 3977 - RNA, 22 nt, Artificial Sequence
  SAMD9 targeting guide sequence portion
uagaguacugcagaagauagau

SEQ ID NO: 3978 - RNA, 22 nt, Artificial Sequence
  SAMD9 targeting guide sequence portion
uagauauuaucuuguucuucaa

SEQ ID NO: 3979 - RNA, 22 nt, Artificial Sequence
  SAMD9 targeting guide sequence portion
uaucuaucuucugcaguacucu

SEQ ID NO: 3980 - RNA, 22 nt, Artificial Sequence
  SAMD9 targeting guide sequence portion
uauuaucuuguucuucaaaauc

SEQ ID NO: 3981 - RNA, 22 nt, Artificial Sequence
  SAMD9 targeting guide sequence portion
ugaagaacaagauaauaucuau

SEQ ID NO: 3982 - RNA, 22 nt, Artificial Sequence
  SAMD9 targeting guide sequence portion
ugaauagaguacugcagaagau

SEQ ID NO: 3983 - RNA, 22 nt, Artificial Sequence
  SAMD9 targeting guide sequence portion
ugaugauuuugaagaacaagau

SEQ ID NO: 3984 - RNA, 22 nt, Artificial Sequence
  SAMD9 targeting guide sequence portion
ugauuuugaagaacaagauaau

SEQ ID NO: 3985 - RNA, 22 nt, Artificial Sequence
  SAMD9 targeting guide sequence portion
ugcagaagauagauauuaucuu

SEQ ID NO: 3986 - RNA, 22 nt, Artificial Sequence
  SAMD9 targeting guide sequence portion
uugaagaacaagauaauaucua

SEQ ID NO: 3987 - RNA, 22 nt, Artificial Sequence
  SAMD9 targeting guide sequence portion
uugaauagaguacugcagaaga

SEQ ID NO: 3988 - RNA, 22 nt, Artificial Sequence
  SAMD9 targeting guide sequence portion
uugaugauuuugaagaacaaga

SEQ ID NO: 3989 - RNA, 22 nt, Artificial Sequence
  SAMD9 targeting guide sequence portion
uuugaagaacaagauaauaucu

SEQ ID NO: 3990 - RNA, 22 nt, Artificial Sequence
  SAMD9 targeting guide sequence portion
uuugaauagaguacugcagaag

SEQ ID NO: 3991 - RNA, 22 nt, Artificial Sequence
  SAMD9 targeting guide sequence portion
uuuugaagaacaagauaauauc

SEQ ID NO: 3992 - RNA, 20 nt, Artificial Sequence
  SAMD9 targeting guide sequence portion
aaacugauuaccuguucucc

SEQ ID NO: 3993 - RNA, 20 nt, Artificial Sequence
  SAMD9 targeting guide sequence portion
aaauuggagaacagguaauc

SEQ ID NO: 3994 - RNA, 20 nt, Artificial Sequence
  SAMD9 targeting guide sequence portion
aacagguaaucaguuuaauc

SEQ ID NO: 3995 - RNA, 20 nt, Artificial Sequence
  SAMD9 targeting guide sequence portion
aacugauuaccuguucucca

SEQ ID NO: 3996 - RNA, 20 nt, Artificial Sequence
  SAMD9 targeting guide sequence portion
aaucaguuuaaucaccuaug

SEQ ID NO: 3997 - RNA, 20 nt, Artificial Sequence
  SAMD9 targeting guide sequence portion
aauuggagaacagguaauca

SEQ ID NO: 3998 - RNA, 20 nt, Artificial Sequence
  SAMD9 targeting guide sequence portion
acagguaaucaguuuaauca

SEQ ID NO: 3999 - RNA, 20 nt, Artificial Sequence
  SAMD9 targeting guide sequence portion
acugauuaccuguucuccaa

SEQ ID NO: 4000 - RNA, 20 nt, Artificial Sequence
  SAMD9 targeting guide sequence portion
agaacagguaaucaguuuaa

SEQ ID NO: 4001 - RNA, 20 nt, Artificial Sequence
  SAMD9 targeting guide sequence portion
agguaaucaguuuaaucacc

SEQ ID NO: 4002 - RNA, 20 nt, Artificial Sequence
  SAMD9 targeting guide sequence portion
aggugauuaaacugauuacc

SEQ ID NO: 4003 - RNA, 20 nt, Artificial Sequence
  SAMD9 targeting guide sequence portion
auaggugauuaaacugauua

SEQ ID NO: 4004 - RNA, 20 nt, Artificial Sequence
  SAMD9 targeting guide sequence portion
aucaguuuaaucaccuaugg

SEQ ID NO: 4005 - RNA, 20 nt, Artificial Sequence
  SAMD9 targeting guide sequence portion
auuaaacugauuaccuguuc

SEQ ID NO: 4006 - RNA, 20 nt, Artificial Sequence
  SAMD9 targeting guide sequence portion
auuaccuguucuccaauuuc

SEQ ID NO: 4007 - RNA, 20 nt, Artificial Sequence
  SAMD9 targeting guide sequence portion
auugccccauaggugauuaa

SEQ ID NO: 4008 - RNA, 20 nt, Artificial Sequence
  SAMD9 targeting guide sequence portion
auuggagaacagguaaucag

SEQ ID NO: 4009 - RNA, 20 nt, Artificial Sequence
  SAMD9 targeting guide sequence portion
cagguaaucaguuuaaucac

SEQ ID NO: 4010 - RNA, 20 nt, Artificial Sequence
  SAMD9 targeting guide sequence portion
cauaggugauuaaacugauu

SEQ ID NO: 4011 - RNA, 20 nt, Artificial Sequence
  SAMD9 targeting guide sequence portion
cauugccccauaggugauua

SEQ ID NO: 4012 - RNA, 20 nt, Artificial Sequence
  SAMD9 targeting guide sequence portion
ccauaggugauuaaacugau

SEQ ID NO: 4013 - RNA, 20 nt, Artificial Sequence
  SAMD9 targeting guide sequence portion
cccauaggugauuaaacuga

SEQ ID NO: 4014 - RNA, 20 nt, Artificial Sequence
  SAMD9 targeting guide sequence portion
ccccauaggugauuaaacug

SEQ ID NO: 4015 - RNA, 20 nt, Artificial Sequence
  SAMD9 targeting guide sequence portion
cugaaauuggagaacaggua

SEQ ID NO: 4016 - RNA, 20 nt, Artificial Sequence
  SAMD9 targeting guide sequence portion
cugauuaccuguucuccaau

SEQ ID NO: 4017 - RNA, 20 nt, Artificial Sequence
  SAMD9 targeting guide sequence portion
gaaauuggagaacagguaau

SEQ ID NO: 4018 - RNA, 20 nt, Artificial Sequence
  SAMD9 targeting guide sequence portion
gaacagguaaucaguuuaau

SEQ ID NO: 4019 - RNA, 20 nt, Artificial Sequence
  SAMD9 targeting guide sequence portion
gagaacagguaaucaguuua

SEQ ID NO: 4020 - RNA, 20 nt, Artificial Sequence
  SAMD9 targeting guide sequence portion
gauuaaacugauuaccuguu

SEQ ID NO: 4021 - RNA, 20 nt, Artificial Sequence
  SAMD9 targeting guide sequence portion
gauuaccuguucuccaauuu

SEQ ID NO: 4022 - RNA, 20 nt, Artificial Sequence
  SAMD9 targeting guide sequence portion
gccccauaggugauuaaacu

SEQ ID NO: 4023 - RNA, 20 nt, Artificial Sequence
  SAMD9 targeting guide sequence portion
ggagaacagguaaucaguuu

SEQ ID NO: 4024 - RNA, 20 nt, Artificial Sequence
  SAMD9 targeting guide sequence portion
gguaaucaguuuaaucaccu

SEQ ID NO: 4025 - RNA, 20 nt, Artificial Sequence
  SAMD9 targeting guide sequence portion
ggugauuaaacugauuaccu

SEQ ID NO: 4026 - RNA, 20 nt, Artificial Sequence
  SAMD9 targeting guide sequence portion
guaaucaguuuaaucaccua

SEQ ID NO: 4027 - RNA, 20 nt, Artificial Sequence
  SAMD9 targeting guide sequence portion
gugauuaaacugauuaccug

SEQ ID NO: 4028 - RNA, 20 nt, Artificial Sequence
  SAMD9 targeting guide sequence portion
uaaacugauuaccuguucuc

SEQ ID NO: 4029 - RNA, 20 nt, Artificial Sequence
  SAMD9 targeting guide sequence portion
uaaucaguuuaaucaccuau

SEQ ID NO: 4030 - RNA, 20 nt, Artificial Sequence
  SAMD9 targeting guide sequence portion
uaggugauuaaacugauuac

SEQ ID NO: 4031 - RNA, 20 nt, Artificial Sequence
  SAMD9 targeting guide sequence portion
ucaguuuaaucaccuauggg

SEQ ID NO: 4032 - RNA, 20 nt, Artificial Sequence
  SAMD9 targeting guide sequence portion
ucugaaauuggagaacaggu

SEQ ID NO: 4033 - RNA, 20 nt, Artificial Sequence
  SAMD9 targeting guide sequence portion
ugaaauuggagaacagguaa

SEQ ID NO: 4034 - RNA, 20 nt, Artificial Sequence
  SAMD9 targeting guide sequence portion
ugauuaaacugauuaccugu

SEQ ID NO: 4035 - RNA, 20 nt, Artificial Sequence
  SAMD9 targeting guide sequence portion
ugauuaccuguucuccaauu

SEQ ID NO: 4036 - RNA, 20 nt, Artificial Sequence
  SAMD9 targeting guide sequence portion
ugccccauaggugauuaaac

SEQ ID NO: 4037 - RNA, 20 nt, Artificial Sequence
  SAMD9 targeting guide sequence portion
uggagaacagguaaucaguu

SEQ ID NO: 4038 - RNA, 20 nt, Artificial Sequence
  SAMD9 targeting guide sequence portion
uuaaacugauuaccuguucu

SEQ ID NO: 4039 - RNA, 20 nt, Artificial Sequence
  SAMD9 targeting guide sequence portion
uucugaaauuggagaacagg

SEQ ID NO: 4040 - RNA, 20 nt, Artificial Sequence
  SAMD9 targeting guide sequence portion
uugccccauaggugauuaaa

SEQ ID NO: 4041 - RNA, 20 nt, Artificial Sequence
  SAMD9 targeting guide sequence portion
uuggagaacagguaaucagu

SEQ ID NO: 4042 - RNA, 20 nt, Artificial Sequence
  SAMD9 targeting guide sequence portion
uuucugaaauuggagaacag

SEQ ID NO: 4043 - RNA, 20 nt, Artificial Sequence
  SAMD9 targeting guide sequence portion
uuuucugaaauuggagaaca

SEQ ID NO: 4044 - RNA, 21 nt, Artificial Sequence
  SAMD9 targeting guide sequence portion
aaacugauuaccuguucucca

SEQ ID NO: 4045 - RNA, 21 nt, Artificial Sequence
  SAMD9 targeting guide sequence portion
aaauuggagaacagguaauca

SEQ ID NO: 4046 - RNA, 21 nt, Artificial Sequence
  SAMD9 targeting guide sequence portion
aacagguaaucaguuuaauca

SEQ ID NO: 4047 - RNA, 21 nt, Artificial Sequence
  SAMD9 targeting guide sequence portion
aacugauuaccuguucuccaa

SEQ ID NO: 4048 - RNA, 21 nt, Artificial Sequence
  SAMD9 targeting guide sequence portion
aaucaguuuaaucaccuaugg

SEQ ID NO: 4049 - RNA, 21 nt, Artificial Sequence
  SAMD9 targeting guide sequence portion
aauuggagaacagguaaucag

SEQ ID NO: 4050 - RNA, 21 nt, Artificial Sequence
  SAMD9 targeting guide sequence portion
acagguaaucaguuuaaucac

SEQ ID NO: 4051 - RNA, 21 nt, Artificial Sequence
  SAMD9 targeting guide sequence portion
acugauuaccuguucuccaau

SEQ ID NO: 4052 - RNA, 21 nt, Artificial Sequence
  SAMD9 targeting guide sequence portion
agaacagguaaucaguuuaau

SEQ ID NO: 4053 - RNA, 21 nt, Artificial Sequence
  SAMD9 targeting guide sequence portion
agguaaucaguuuaaucaccu

SEQ ID NO: 4054 - RNA, 21 nt, Artificial Sequence
  SAMD9 targeting guide sequence portion
aggugauuaaacugauuaccu

SEQ ID NO: 4055 - RNA, 21 nt, Artificial Sequence
  SAMD9 targeting guide sequence portion
auaggugauuaaacugauuac

SEQ ID NO: 4056 - RNA, 21 nt, Artificial Sequence
  SAMD9 targeting guide sequence portion
aucaguuuaaucaccuauggg

SEQ ID NO: 4057 - RNA, 21 nt, Artificial Sequence
  SAMD9 targeting guide sequence portion
auuaaacugauuaccuguucu

SEQ ID NO: 4058 - RNA, 21 nt, Artificial Sequence
  SAMD9 targeting guide sequence portion
auuaccuguucuccaauuuca

SEQ ID NO: 4059 - RNA, 21 nt, Artificial Sequence
  SAMD9 targeting guide sequence portion
auugccccauaggugauuaaa

SEQ ID NO: 4060 - RNA, 21 nt, Artificial Sequence
  SAMD9 targeting guide sequence portion
auuggagaacagguaaucagu

SEQ ID NO: 4061 - RNA, 21 nt, Artificial Sequence
  SAMD9 targeting guide sequence portion
cagguaaucaguuuaaucacc

SEQ ID NO: 4062 - RNA, 21 nt, Artificial Sequence
  SAMD9 targeting guide sequence portion
cauaggugauuaaacugauua

SEQ ID NO: 4063 - RNA, 21 nt, Artificial Sequence
  SAMD9 targeting guide sequence portion
cauugccccauaggugauuaa

SEQ ID NO: 4064 - RNA, 21 nt, Artificial Sequence
  SAMD9 targeting guide sequence portion
ccauaggugauuaaacugauu

SEQ ID NO: 4065 - RNA, 21 nt, Artificial Sequence
  SAMD9 targeting guide sequence portion
cccauaggugauuaaacugau

SEQ ID NO: 4066 - RNA, 21 nt, Artificial Sequence
  SAMD9 targeting guide sequence portion
ccccauaggugauuaaacuga

SEQ ID NO: 4067 - RNA, 21 nt, Artificial Sequence
  SAMD9 targeting guide sequence portion
cugaaauuggagaacagguaa

SEQ ID NO: 4068 - RNA, 21 nt, Artificial Sequence
  SAMD9 targeting guide sequence portion
cugauuaccuguucuccaauu

SEQ ID NO: 4069 - RNA, 21 nt, Artificial Sequence
  SAMD9 targeting guide sequence portion
gaaauuggagaacagguaauc

SEQ ID NO: 4070 - RNA, 21 nt, Artificial Sequence
  SAMD9 targeting guide sequence portion
gaacagguaaucaguuuaauc

SEQ ID NO: 4071 - RNA, 21 nt, Artificial Sequence
  SAMD9 targeting guide sequence portion
gagaacagguaaucaguuuaa

SEQ ID NO: 4072 - RNA, 21 nt, Artificial Sequence
  SAMD9 targeting guide sequence portion
gauuaaacugauuaccuguuc

SEQ ID NO: 4073 - RNA, 21 nt, Artificial Sequence
  SAMD9 targeting guide sequence portion
gauuaccuguucuccaauuuc

SEQ ID NO: 4074 - RNA, 21 nt, Artificial Sequence
  SAMD9 targeting guide sequence portion
gccccauaggugauuaaacug

SEQ ID NO: 4075 - RNA, 21 nt, Artificial Sequence
  SAMD9 targeting guide sequence portion
ggagaacagguaaucaguuua

SEQ ID NO: 4076 - RNA, 21 nt, Artificial Sequence
  SAMD9 targeting guide sequence portion
gguaaucaguuuaaucaccua

SEQ ID NO: 4077 - RNA, 21 nt, Artificial Sequence
  SAMD9 targeting guide sequence portion
ggugauuaaacugauuaccug

SEQ ID NO: 4078 - RNA, 21 nt, Artificial Sequence
  SAMD9 targeting guide sequence portion
guaaucaguuuaaucaccuau

SEQ ID NO: 4079 - RNA, 21 nt, Artificial Sequence
  SAMD9 targeting guide sequence portion
gugauuaaacugauuaccugu

SEQ ID NO: 4080 - RNA, 21 nt, Artificial Sequence
  SAMD9 targeting guide sequence portion
uaaacugauuaccuguucucc

SEQ ID NO: 4081 - RNA, 21 nt, Artificial Sequence
  SAMD9 targeting guide sequence portion
uaaucaguuuaaucaccuaug

SEQ ID NO: 4082 - RNA, 21 nt, Artificial Sequence
  SAMD9 targeting guide sequence portion
uaggugauuaaacugauuacc

SEQ ID NO: 4083 - RNA, 21 nt, Artificial Sequence
  SAMD9 targeting guide sequence portion
ucaguuuaaucaccuaugggg

SEQ ID NO: 4084 - RNA, 21 nt, Artificial Sequence
  SAMD9 targeting guide sequence portion
ucauugccccauaggugauua

SEQ ID NO: 4085 - RNA, 21 nt, Artificial Sequence
  SAMD9 targeting guide sequence portion
ucugaaauuggagaacaggua

SEQ ID NO: 4086 - RNA, 21 nt, Artificial Sequence
  SAMD9 targeting guide sequence portion
ugaaauuggagaacagguaau

SEQ ID NO: 4087 - RNA, 21 nt, Artificial Sequence
  SAMD9 targeting guide sequence portion
ugauuaaacugauuaccuguu

SEQ ID NO: 4088 - RNA, 21 nt, Artificial Sequence
  SAMD9 targeting guide sequence portion
ugauuaccuguucuccaauuu

SEQ ID NO: 4089 - RNA, 21 nt, Artificial Sequence
  SAMD9 targeting guide sequence portion
ugccccauaggugauuaaacu

SEQ ID NO: 4090 - RNA, 21 nt, Artificial Sequence
  SAMD9 targeting guide sequence portion
uggagaacagguaaucaguuu

SEQ ID NO: 4091 - RNA, 21 nt, Artificial Sequence
  SAMD9 targeting guide sequence portion
uuaaacugauuaccuguucuc

SEQ ID NO: 4092 - RNA, 21 nt, Artificial Sequence
  SAMD9 targeting guide sequence portion
uucugaaauuggagaacaggu

SEQ ID NO: 4093 - RNA, 21 nt, Artificial Sequence
  SAMD9 targeting guide sequence portion
uugccccauaggugauuaaac

SEQ ID NO: 4094 - RNA, 21 nt, Artificial Sequence
  SAMD9 targeting guide sequence portion
uuggagaacagguaaucaguu

SEQ ID NO: 4095 - RNA, 21 nt, Artificial Sequence
  SAMD9 targeting guide sequence portion
uuucugaaauuggagaacagg

SEQ ID NO: 4096 - RNA, 21 nt, Artificial Sequence
  SAMD9 targeting guide sequence portion
uuuucugaaauuggagaacag

SEQ ID NO: 4097 - RNA, 21 nt, Artificial Sequence
  SAMD9 targeting guide sequence portion
uuuuucugaaauuggagaaca

SEQ ID NO: 4098 - RNA, 22 nt, Artificial Sequence
  SAMD9 targeting guide sequence portion
aaacugauuaccuguucuccaa

SEQ ID NO: 4099 - RNA, 22 nt, Artificial Sequence
  SAMD9 targeting guide sequence portion
aaauuggagaacagguaaucag

SEQ ID NO: 4100 - RNA, 22 nt, Artificial Sequence
  SAMD9 targeting guide sequence portion
aacagguaaucaguuuaaucac

SEQ ID NO: 4101 - RNA, 22 nt, Artificial Sequence
  SAMD9 targeting guide sequence portion
aacugauuaccuguucuccaau

SEQ ID NO: 4102 - RNA, 22 nt, Artificial Sequence
  SAMD9 targeting guide sequence portion
aaucaguuuaaucaccuauggg

SEQ ID NO: 4103 - RNA, 22 nt, Artificial Sequence
  SAMD9 targeting guide sequence portion
aauuggagaacagguaaucagu

SEQ ID NO: 4104 - RNA, 22 nt, Artificial Sequence
  SAMD9 targeting guide sequence portion
acagguaaucaguuuaaucacc

SEQ ID NO: 4105 - RNA, 22 nt, Artificial Sequence
  SAMD9 targeting guide sequence portion
acugauuaccuguucuccaauu

SEQ ID NO: 4106 - RNA, 22 nt, Artificial Sequence
  SAMD9 targeting guide sequence portion
agaacagguaaucaguuuaauc

SEQ ID NO: 4107 - RNA, 22 nt, Artificial Sequence
  SAMD9 targeting guide sequence portion
agguaaucaguuuaaucaccua

SEQ ID NO: 4108 - RNA, 22 nt, Artificial Sequence
  SAMD9 targeting guide sequence portion
aggugauuaaacugauuaccug

SEQ ID NO: 4109 - RNA, 22 nt, Artificial Sequence
  SAMD9 targeting guide sequence portion
auaggugauuaaacugauuacc

SEQ ID NO: 4110 - RNA, 22 nt, Artificial Sequence
  SAMD9 targeting guide sequence portion
aucaguuuaaucaccuaugggg

SEQ ID NO: 4111 - RNA, 22 nt, Artificial Sequence
  SAMD9 targeting guide sequence portion
auuaaacugauuaccuguucuc

SEQ ID NO: 4112 - RNA, 22 nt, Artificial Sequence
  SAMD9 targeting guide sequence portion
auuaccuguucuccaauuucag

SEQ ID NO: 4113 - RNA, 22 nt, Artificial Sequence
  SAMD9 targeting guide sequence portion
auugccccauaggugauuaaac

SEQ ID NO: 4114 - RNA, 22 nt, Artificial Sequence
  SAMD9 targeting guide sequence portion
auuggagaacagguaaucaguu

SEQ ID NO: 4115 - RNA, 22 nt, Artificial Sequence
  SAMD9 targeting guide sequence portion
auuuuucugaaauuggagaaca

SEQ ID NO: 4116 - RNA, 22 nt, Artificial Sequence
  SAMD9 targeting guide sequence portion
cagguaaucaguuuaaucaccu

SEQ ID NO: 4117 - RNA, 22 nt, Artificial Sequence
  SAMD9 targeting guide sequence portion
cauaggugauuaaacugauuac

SEQ ID NO: 4118 - RNA, 22 nt, Artificial Sequence
  SAMD9 targeting guide sequence portion
cauugccccauaggugauuaaa

SEQ ID NO: 4119 - RNA, 22 nt, Artificial Sequence
  SAMD9 targeting guide sequence portion
ccauaggugauuaaacugauua

SEQ ID NO: 4120 - RNA, 22 nt, Artificial Sequence
  SAMD9 targeting guide sequence portion
cccauaggugauuaaacugauu

SEQ ID NO: 4121 - RNA, 22 nt, Artificial Sequence
  SAMD9 targeting guide sequence portion
ccccauaggugauuaaacugau

SEQ ID NO: 4122 - RNA, 22 nt, Artificial Sequence
  SAMD9 targeting guide sequence portion
cugaaauuggagaacagguaau

SEQ ID NO: 4123 - RNA, 22 nt, Artificial Sequence
  SAMD9 targeting guide sequence portion
cugauuaccuguucuccaauuu

SEQ ID NO: 4124 - RNA, 22 nt, Artificial Sequence
  SAMD9 targeting guide sequence portion
gaaauuggagaacagguaauca

SEQ ID NO: 4125 - RNA, 22 nt, Artificial Sequence
  SAMD9 targeting guide sequence portion
gaacagguaaucaguuuaauca

SEQ ID NO: 4126 - RNA, 22 nt, Artificial Sequence
  SAMD9 targeting guide sequence portion
gagaacagguaaucaguuuaau

SEQ ID NO: 4127 - RNA, 22 nt, Artificial Sequence
  SAMD9 targeting guide sequence portion
gauuaaacugauuaccuguucu

SEQ ID NO: 4128 - RNA, 22 nt, Artificial Sequence
  SAMD9 targeting guide sequence portion
gauuaccuguucuccaauuuca

SEQ ID NO: 4129 - RNA, 22 nt, Artificial Sequence
  SAMD9 targeting guide sequence portion
gccccauaggugauuaaacuga

SEQ ID NO: 4130 - RNA, 22 nt, Artificial Sequence
  SAMD9 targeting guide sequence portion
ggagaacagguaaucaguuuaa

SEQ ID NO: 4131 - RNA, 22 nt, Artificial Sequence
  SAMD9 targeting guide sequence portion
gguaaucaguuuaaucaccuau

SEQ ID NO: 4132 - RNA, 22 nt, Artificial Sequence
  SAMD9 targeting guide sequence portion
ggugauuaaacugauuaccugu

SEQ ID NO: 4133 - RNA, 22 nt, Artificial Sequence
  SAMD9 targeting guide sequence portion
guaaucaguuuaaucaccuaug

SEQ ID NO: 4134 - RNA, 22 nt, Artificial Sequence
  SAMD9 targeting guide sequence portion
gugauuaaacugauuaccuguu

SEQ ID NO: 4135 - RNA, 22 nt, Artificial Sequence
  SAMD9 targeting guide sequence portion
uaaacugauuaccuguucucca

SEQ ID NO: 4136 - RNA, 22 nt, Artificial Sequence
  SAMD9 targeting guide sequence portion
uaaucaguuuaaucaccuaugg

SEQ ID NO: 4137 - RNA, 22 nt, Artificial Sequence
  SAMD9 targeting guide sequence portion
uaggugauuaaacugauuaccu

SEQ ID NO: 4138 - RNA, 22 nt, Artificial Sequence
  SAMD9 targeting guide sequence portion
ucaguuuaaucaccuauggggc

SEQ ID NO: 4139 - RNA, 22 nt, Artificial Sequence
  SAMD9 targeting guide sequence portion
ucauugccccauaggugauuaa

SEQ ID NO: 4140 - RNA, 22 nt, Artificial Sequence
  SAMD9 targeting guide sequence portion
ucugaaauuggagaacagguaa

SEQ ID NO: 4141 - RNA, 22 nt, Artificial Sequence
  SAMD9 targeting guide sequence portion
ugaaauuggagaacagguaauc

SEQ ID NO: 4142 - RNA, 22 nt, Artificial Sequence
  SAMD9 targeting guide sequence portion
ugauuaaacugauuaccuguuc

SEQ ID NO: 4143 - RNA, 22 nt, Artificial Sequence
  SAMD9 targeting guide sequence portion
ugauuaccuguucuccaauuuc

SEQ ID NO: 4144 - RNA, 22 nt, Artificial Sequence
  SAMD9 targeting guide sequence portion
ugccccauaggugauuaaacug

SEQ ID NO: 4145 - RNA, 22 nt, Artificial Sequence
  SAMD9 targeting guide sequence portion
uggagaacagguaaucaguuua

SEQ ID NO: 4146 - RNA, 22 nt, Artificial Sequence
  SAMD9 targeting guide sequence portion
uuaaacugauuaccuguucucc

SEQ ID NO: 4147 - RNA, 22 nt, Artificial Sequence
  SAMD9 targeting guide sequence portion
uucauugccccauaggugauua

SEQ ID NO: 4148 - RNA, 22 nt, Artificial Sequence
  SAMD9 targeting guide sequence portion
uucugaaauuggagaacaggua

SEQ ID NO: 4149 - RNA, 22 nt, Artificial Sequence
  SAMD9 targeting guide sequence portion
uugccccauaggugauuaaacu

SEQ ID NO: 4150 - RNA, 22 nt, Artificial Sequence
  SAMD9 targeting guide sequence portion
uuggagaacagguaaucaguuu

SEQ ID NO: 4151 - RNA, 22 nt, Artificial Sequence
  SAMD9 targeting guide sequence portion
uuucugaaauuggagaacaggu

SEQ ID NO: 4152 - RNA, 22 nt, Artificial Sequence
  SAMD9 targeting guide sequence portion
uuuucugaaauuggagaacagg

SEQ ID NO: 4153 - RNA, 22 nt, Artificial Sequence
  SAMD9 targeting guide sequence portion
uuuuucugaaauuggagaacag

SEQ ID NO: 4154 - RNA, 20 nt, Artificial Sequence
  SAMD9 targeting guide sequence portion
aaaagguaaccaguuuaauc

SEQ ID NO: 4155 - RNA, 20 nt, Artificial Sequence
  SAMD9 targeting guide sequence portion
aaacugguuaccuuuucucc

SEQ ID NO: 4156 - RNA, 20 nt, Artificial Sequence
  SAMD9 targeting guide sequence portion
aaagguaaccaguuuaauca

SEQ ID NO: 4157 - RNA, 20 nt, Artificial Sequence
  SAMD9 targeting guide sequence portion
aaauuggagaaaagguaacc

SEQ ID NO: 4158 - RNA, 20 nt, Artificial Sequence
  SAMD9 targeting guide sequence portion
aacugguuaccuuuucucca

SEQ ID NO: 4159 - RNA, 20 nt, Artificial Sequence
  SAMD9 targeting guide sequence portion
aagguaaccaguuuaaucac

SEQ ID NO: 4160 - RNA, 20 nt, Artificial Sequence
  SAMD9 targeting guide sequence portion
aauuggagaaaagguaacca

SEQ ID NO: 4161 - RNA, 20 nt, Artificial Sequence
  SAMD9 targeting guide sequence portion
accuuuucuccaauuucaga

SEQ ID NO: 4162 - RNA, 20 nt, Artificial Sequence
  SAMD9 targeting guide sequence portion
acugguuaccuuuucuccaa

SEQ ID NO: 4163 - RNA, 20 nt, Artificial Sequence
  SAMD9 targeting guide sequence portion
agaaaagguaaccaguuuaa

SEQ ID NO: 4164 - RNA, 20 nt, Artificial Sequence
  SAMD9 targeting guide sequence portion
aggugauuaaacugguuacc

SEQ ID NO: 4165 - RNA, 20 nt, Artificial Sequence
  SAMD9 targeting guide sequence portion
aguggauuuuucugaaauug

SEQ ID NO: 4166 - RNA, 20 nt, Artificial Sequence
  SAMD9 targeting guide sequence portion
auaggugauuaaacugguua

SEQ ID NO: 4167 - RNA, 20 nt, Artificial Sequence
  SAMD9 targeting guide sequence portion
auuaaacugguuaccuuuuc

SEQ ID NO: 4168 - RNA, 20 nt, Artificial Sequence
  SAMD9 targeting guide sequence portion
auuggagaaaagguaaccag

SEQ ID NO: 4169 - RNA, 20 nt, Artificial Sequence
  SAMD9 targeting guide sequence portion
auuuuucugaaauuggagaa

SEQ ID NO: 4170 - RNA, 20 nt, Artificial Sequence
  SAMD9 targeting guide sequence portion
cauaggugauuaaacugguu

SEQ ID NO: 4171 - RNA, 20 nt, Artificial Sequence
  SAMD9 targeting guide sequence portion
ccauaggugauuaaacuggu

SEQ ID NO: 4172 - RNA, 20 nt, Artificial Sequence
  SAMD9 targeting guide sequence portion
ccuuuucuccaauuucagaa

SEQ ID NO: 4173 - RNA, 20 nt, Artificial Sequence
  SAMD9 targeting guide sequence portion
cugaaauuggagaaaaggua

SEQ ID NO: 4174 - RNA, 20 nt, Artificial Sequence
  SAMD9 targeting guide sequence portion
cugguuaccuuuucuccaau

SEQ ID NO: 4175 - RNA, 20 nt, Artificial Sequence
  SAMD9 targeting guide sequence portion
cuuuucuccaauuucagaaa

SEQ ID NO: 4176 - RNA, 20 nt, Artificial Sequence
  SAMD9 targeting guide sequence portion
gaaaagguaaccaguuuaau

SEQ ID NO: 4177 - RNA, 20 nt, Artificial Sequence
  SAMD9 targeting guide sequence portion
gaaauuggagaaaagguaac

SEQ ID NO: 4178 - RNA, 20 nt, Artificial Sequence
  SAMD9 targeting guide sequence portion
gagaaaagguaaccaguuua

SEQ ID NO: 4179 - RNA, 20 nt, Artificial Sequence
  SAMD9 targeting guide sequence portion
gauuaaacugguuaccuuuu

SEQ ID NO: 4180 - RNA, 20 nt, Artificial Sequence
  SAMD9 targeting guide sequence portion
gauuuuucugaaauuggaga

SEQ ID NO: 4181 - RNA, 20 nt, Artificial Sequence
  SAMD9 targeting guide sequence portion
ggagaaaagguaaccaguuu

SEQ ID NO: 4182 - RNA, 20 nt, Artificial Sequence
  SAMD9 targeting guide sequence portion
ggauuuuucugaaauuggag

SEQ ID NO: 4183 - RNA, 20 nt, Artificial Sequence
  SAMD9 targeting guide sequence portion
ggugauuaaacugguuaccu

SEQ ID NO: 4184 - RNA, 20 nt, Artificial Sequence
  SAMD9 targeting guide sequence portion
gguuaccuuuucuccaauuu

SEQ ID NO: 4185 - RNA, 20 nt, Artificial Sequence
  SAMD9 targeting guide sequence portion
gugauuaaacugguuaccuu

SEQ ID NO: 4186 - RNA, 20 nt, Artificial Sequence
  SAMD9 targeting guide sequence portion
guggauuuuucugaaauugg

SEQ ID NO: 4187 - RNA, 20 nt, Artificial Sequence
  SAMD9 targeting guide sequence portion
guuaccuuuucuccaauuuc

SEQ ID NO: 4188 - RNA, 20 nt, Artificial Sequence
  SAMD9 targeting guide sequence portion
uaaacugguuaccuuuucuc

SEQ ID NO: 4189 - RNA, 20 nt, Artificial Sequence
  SAMD9 targeting guide sequence portion
uaccuuuucuccaauuucag

SEQ ID NO: 4190 - RNA, 20 nt, Artificial Sequence
  SAMD9 targeting guide sequence portion
uaggugauuaaacugguuac

SEQ ID NO: 4191 - RNA, 20 nt, Artificial Sequence
  SAMD9 targeting guide sequence portion
ucugaaauuggagaaaaggu

SEQ ID NO: 4192 - RNA, 20 nt, Artificial Sequence
  SAMD9 targeting guide sequence portion
ugaaauuggagaaaagguaa

SEQ ID NO: 4193 - RNA, 20 nt, Artificial Sequence
  SAMD9 targeting guide sequence portion
ugauuaaacugguuaccuuu

SEQ ID NO: 4194 - RNA, 20 nt, Artificial Sequence
  SAMD9 targeting guide sequence portion
uggagaaaagguaaccaguu

SEQ ID NO: 4195 - RNA, 20 nt, Artificial Sequence
  SAMD9 targeting guide sequence portion
uggauuuuucugaaauugga

SEQ ID NO: 4196 - RNA, 20 nt, Artificial Sequence
  SAMD9 targeting guide sequence portion
ugguuaccuuuucuccaauu

SEQ ID NO: 4197 - RNA, 20 nt, Artificial Sequence
  SAMD9 targeting guide sequence portion
uuaaacugguuaccuuuucu

SEQ ID NO: 4198 - RNA, 20 nt, Artificial Sequence
  SAMD9 targeting guide sequence portion
uuaccuuuucuccaauuuca

SEQ ID NO: 4199 - RNA, 20 nt, Artificial Sequence
  SAMD9 targeting guide sequence portion
uucugaaauuggagaaaagg

SEQ ID NO: 4200 - RNA, 20 nt, Artificial Sequence
  SAMD9 targeting guide sequence portion
uuggagaaaagguaaccagu

SEQ ID NO: 4201 - RNA, 20 nt, Artificial Sequence
  SAMD9 targeting guide sequence portion
uuucuccaauuucagaaaaa

SEQ ID NO: 4202 - RNA, 20 nt, Artificial Sequence
  SAMD9 targeting guide sequence portion
uuucugaaauuggagaaaag

SEQ ID NO: 4203 - RNA, 20 nt, Artificial Sequence
  SAMD9 targeting guide sequence portion
uuuucuccaauuucagaaaa

SEQ ID NO: 4204 - RNA, 20 nt, Artificial Sequence
  SAMD9 targeting guide sequence portion
uuuucugaaauuggagaaaa

SEQ ID NO: 4205 - RNA, 20 nt, Artificial Sequence
  SAMD9 targeting guide sequence portion
uuuuucugaaauuggagaaa

SEQ ID NO: 4206 - RNA, 21 nt, Artificial Sequence
  SAMD9 targeting guide sequence portion
aaaagguaaccaguuuaauca

SEQ ID NO: 4207 - RNA, 21 nt, Artificial Sequence
  SAMD9 targeting guide sequence portion
aaacugguuaccuuuucucca

SEQ ID NO: 4208 - RNA, 21 nt, Artificial Sequence
  SAMD9 targeting guide sequence portion
aaagguaaccaguuuaaucac

SEQ ID NO: 4209 - RNA, 21 nt, Artificial Sequence
  SAMD9 targeting guide sequence portion
aaauuggagaaaagguaacca

SEQ ID NO: 4210 - RNA, 21 nt, Artificial Sequence
  SAMD9 targeting guide sequence portion
aacugguuaccuuuucuccaa

SEQ ID NO: 4211 - RNA, 21 nt, Artificial Sequence
  SAMD9 targeting guide sequence portion
aagguaaccaguuuaaucacc

SEQ ID NO: 4212 - RNA, 21 nt, Artificial Sequence
  SAMD9 targeting guide sequence portion
aauuggagaaaagguaaccag

SEQ ID NO: 4213 - RNA, 21 nt, Artificial Sequence
  SAMD9 targeting guide sequence portion
accuuuucuccaauuucagaa

SEQ ID NO: 4214 - RNA, 21 nt, Artificial Sequence
  SAMD9 targeting guide sequence portion
acugguuaccuuuucuccaau

SEQ ID NO: 4215 - RNA, 21 nt, Artificial Sequence
  SAMD9 targeting guide sequence portion
agaaaagguaaccaguuuaau

SEQ ID NO: 4216 - RNA, 21 nt, Artificial Sequence
  SAMD9 targeting guide sequence portion
aggugauuaaacugguuaccu

SEQ ID NO: 4217 - RNA, 21 nt, Artificial Sequence
  SAMD9 targeting guide sequence portion
aguggauuuuucugaaauugg

SEQ ID NO: 4218 - RNA, 21 nt, Artificial Sequence
  SAMD9 targeting guide sequence portion
auaggugauuaaacugguuac

SEQ ID NO: 4219 - RNA, 21 nt, Artificial Sequence
  SAMD9 targeting guide sequence portion
auuaaacugguuaccuuuucu

SEQ ID NO: 4220 - RNA, 21 nt, Artificial Sequence
  SAMD9 targeting guide sequence portion
auuggagaaaagguaaccagu

SEQ ID NO: 4221 - RNA, 21 nt, Artificial Sequence
  SAMD9 targeting guide sequence portion
auuuuucugaaauuggagaaa

SEQ ID NO: 4222 - RNA, 21 nt, Artificial Sequence
  SAMD9 targeting guide sequence portion
caguggauuuuucugaaauug

SEQ ID NO: 4223 - RNA, 21 nt, Artificial Sequence
  SAMD9 targeting guide sequence portion
cauaggugauuaaacugguua

SEQ ID NO: 4224 - RNA, 21 nt, Artificial Sequence
  SAMD9 targeting guide sequence portion
ccauaggugauuaaacugguu

SEQ ID NO: 4225 - RNA, 21 nt, Artificial Sequence
  SAMD9 targeting guide sequence portion
cccauaggugauuaaacuggu

SEQ ID NO: 4226 - RNA, 21 nt, Artificial Sequence
  SAMD9 targeting guide sequence portion
ccuuuucuccaauuucagaaa

SEQ ID NO: 4227 - RNA, 21 nt, Artificial Sequence
  SAMD9 targeting guide sequence portion
cugaaauuggagaaaagguaa

SEQ ID NO: 4228 - RNA, 21 nt, Artificial Sequence
  SAMD9 targeting guide sequence portion
cugguuaccuuuucuccaauu

SEQ ID NO: 4229 - RNA, 21 nt, Artificial Sequence
  SAMD9 targeting guide sequence portion
cuuuucuccaauuucagaaaa

SEQ ID NO: 4230 - RNA, 21 nt, Artificial Sequence
  SAMD9 targeting guide sequence portion
gaaaagguaaccaguuuaauc

SEQ ID NO: 4231 - RNA, 21 nt, Artificial Sequence
  SAMD9 targeting guide sequence portion
gaaauuggagaaaagguaacc

SEQ ID NO: 4232 - RNA, 21 nt, Artificial Sequence
  SAMD9 targeting guide sequence portion
gagaaaagguaaccaguuuaa

SEQ ID NO: 4233 - RNA, 21 nt, Artificial Sequence
  SAMD9 targeting guide sequence portion
gauuaaacugguuaccuuuuc

SEQ ID NO: 4234 - RNA, 21 nt, Artificial Sequence
  SAMD9 targeting guide sequence portion
gauuuuucugaaauuggagaa

SEQ ID NO: 4235 - RNA, 21 nt, Artificial Sequence
  SAMD9 targeting guide sequence portion
ggagaaaagguaaccaguuua

SEQ ID NO: 4236 - RNA, 21 nt, Artificial Sequence
  SAMD9 targeting guide sequence portion
ggauuuuucugaaauuggaga

SEQ ID NO: 4237 - RNA, 21 nt, Artificial Sequence
  SAMD9 targeting guide sequence portion
ggugauuaaacugguuaccuu

SEQ ID NO: 4238 - RNA, 21 nt, Artificial Sequence
  SAMD9 targeting guide sequence portion
gguuaccuuuucuccaauuuc

SEQ ID NO: 4239 - RNA, 21 nt, Artificial Sequence
  SAMD9 targeting guide sequence portion
gugauuaaacugguuaccuuu

SEQ ID NO: 4240 - RNA, 21 nt, Artificial Sequence
  SAMD9 targeting guide sequence portion
guggauuuuucugaaauugga

SEQ ID NO: 4241 - RNA, 21 nt, Artificial Sequence
  SAMD9 targeting guide sequence portion
guuaccuuuucuccaauuuca

SEQ ID NO: 4242 - RNA, 21 nt, Artificial Sequence
  SAMD9 targeting guide sequence portion
uaaacugguuaccuuuucucc

SEQ ID NO: 4243 - RNA, 21 nt, Artificial Sequence
  SAMD9 targeting guide sequence portion
uaccuuuucuccaauuucaga

SEQ ID NO: 4244 - RNA, 21 nt, Artificial Sequence
  SAMD9 targeting guide sequence portion
uaggugauuaaacugguuacc

SEQ ID NO: 4245 - RNA, 21 nt, Artificial Sequence
  SAMD9 targeting guide sequence portion
ucugaaauuggagaaaaggua

SEQ ID NO: 4246 - RNA, 21 nt, Artificial Sequence
  SAMD9 targeting guide sequence portion
ugaaauuggagaaaagguaac

SEQ ID NO: 4247 - RNA, 21 nt, Artificial Sequence
  SAMD9 targeting guide sequence portion
ugauuaaacugguuaccuuuu

SEQ ID NO: 4248 - RNA, 21 nt, Artificial Sequence
  SAMD9 targeting guide sequence portion
uggagaaaagguaaccaguuu

SEQ ID NO: 4249 - RNA, 21 nt, Artificial Sequence
  SAMD9 targeting guide sequence portion
uggauuuuucugaaauuggag

SEQ ID NO: 4250 - RNA, 21 nt, Artificial Sequence
  SAMD9 targeting guide sequence portion
ugguuaccuuuucuccaauuu

SEQ ID NO: 4251 - RNA, 21 nt, Artificial Sequence
  SAMD9 targeting guide sequence portion
uuaaacugguuaccuuuucuc

SEQ ID NO: 4252 - RNA, 21 nt, Artificial Sequence
  SAMD9 targeting guide sequence portion
uuaccuuuucuccaauuucag

SEQ ID NO: 4253 - RNA, 21 nt, Artificial Sequence
  SAMD9 targeting guide sequence portion
uucugaaauuggagaaaaggu

SEQ ID NO: 4254 - RNA, 21 nt, Artificial Sequence
  SAMD9 targeting guide sequence portion
uuggagaaaagguaaccaguu

SEQ ID NO: 4255 - RNA, 21 nt, Artificial Sequence
  SAMD9 targeting guide sequence portion
uuucuccaauuucagaaaaau

SEQ ID NO: 4256 - RNA, 21 nt, Artificial Sequence
  SAMD9 targeting guide sequence portion
uuucugaaauuggagaaaagg

SEQ ID NO: 4257 - RNA, 21 nt, Artificial Sequence
  SAMD9 targeting guide sequence portion
uuuucuccaauuucagaaaaa

SEQ ID NO: 4258 - RNA, 21 nt, Artificial Sequence
  SAMD9 targeting guide sequence portion
uuuucugaaauuggagaaaag

SEQ ID NO: 4259 - RNA, 21 nt, Artificial Sequence
  SAMD9 targeting guide sequence portion
uuuuucugaaauuggagaaaa

SEQ ID NO: 4260 - RNA, 22 nt, Artificial Sequence
  SAMD9 targeting guide sequence portion
aaaagguaaccaguuuaaucac

SEQ ID NO: 4261 - RNA, 22 nt, Artificial Sequence
  SAMD9 targeting guide sequence portion
aaacugguuaccuuuucuccaa

SEQ ID NO: 4262 - RNA, 22 nt, Artificial Sequence
  SAMD9 targeting guide sequence portion
aaagguaaccaguuuaaucacc

SEQ ID NO: 4263 - RNA, 22 nt, Artificial Sequence
  SAMD9 targeting guide sequence portion
aaauuggagaaaagguaaccag

SEQ ID NO: 4264 - RNA, 22 nt, Artificial Sequence
  SAMD9 targeting guide sequence portion
aacugguuaccuuuucuccaau

SEQ ID NO: 4265 - RNA, 22 nt, Artificial Sequence
  SAMD9 targeting guide sequence portion
aagguaaccaguuuaaucaccu

SEQ ID NO: 4266 - RNA, 22 nt, Artificial Sequence
  SAMD9 targeting guide sequence portion
aauuggagaaaagguaaccagu

SEQ ID NO: 4267 - RNA, 22 nt, Artificial Sequence
  SAMD9 targeting guide sequence portion
acaguggauuuuucugaaauug

SEQ ID NO: 4268 - RNA, 22 nt, Artificial Sequence
  SAMD9 targeting guide sequence portion
accuuuucuccaauuucagaaa

SEQ ID NO: 4269 - RNA, 22 nt, Artificial Sequence
  SAMD9 targeting guide sequence portion
acugguuaccuuuucuccaauu

SEQ ID NO: 4270 - RNA, 22 nt, Artificial Sequence
  SAMD9 targeting guide sequence portion
agaaaagguaaccaguuuaauc

SEQ ID NO: 4271 - RNA, 22 nt, Artificial Sequence
  SAMD9 targeting guide sequence portion
aggugauuaaacugguuaccuu

SEQ ID NO: 4272 - RNA, 22 nt, Artificial Sequence
  SAMD9 targeting guide sequence portion
aguggauuuuucugaaauugga

SEQ ID NO: 4273 - RNA, 22 nt, Artificial Sequence
  SAMD9 targeting guide sequence portion
auaggugauuaaacugguuacc

SEQ ID NO: 4274 - RNA, 22 nt, Artificial Sequence
  SAMD9 targeting guide sequence portion
auuaaacugguuaccuuuucuc

SEQ ID NO: 4275 - RNA, 22 nt, Artificial Sequence
  SAMD9 targeting guide sequence portion
auuggagaaaagguaaccaguu

SEQ ID NO: 4276 - RNA, 22 nt, Artificial Sequence
  SAMD9 targeting guide sequence portion
auuuuucugaaauuggagaaaa

SEQ ID NO: 4277 - RNA, 22 nt, Artificial Sequence
  SAMD9 targeting guide sequence portion
caguggauuuuucugaaauugg

SEQ ID NO: 4278 - RNA, 22 nt, Artificial Sequence
  SAMD9 targeting guide sequence portion
cauaggugauuaaacugguuac

SEQ ID NO: 4279 - RNA, 22 nt, Artificial Sequence
  SAMD9 targeting guide sequence portion
ccauaggugauuaaacugguua

SEQ ID NO: 4280 - RNA, 22 nt, Artificial Sequence
  SAMD9 targeting guide sequence portion
cccauaggugauuaaacugguu

SEQ ID NO: 4281 - RNA, 22 nt, Artificial Sequence
  SAMD9 targeting guide sequence portion
ccccauaggugauuaaacuggu

SEQ ID NO: 4282 - RNA, 22 nt, Artificial Sequence
  SAMD9 targeting guide sequence portion
ccuuuucuccaauuucagaaaa

SEQ ID NO: 4283 - RNA, 22 nt, Artificial Sequence
  SAMD9 targeting guide sequence portion
cugaaauuggagaaaagguaac

SEQ ID NO: 4284 - RNA, 22 nt, Artificial Sequence
  SAMD9 targeting guide sequence portion
cugguuaccuuuucuccaauuu

SEQ ID NO: 4285 - RNA, 22 nt, Artificial Sequence
  SAMD9 targeting guide sequence portion
cuuuucuccaauuucagaaaaa

SEQ ID NO: 4286 - RNA, 22 nt, Artificial Sequence
  SAMD9 targeting guide sequence portion
gaaaagguaaccaguuuaauca

SEQ ID NO: 4287 - RNA, 22 nt, Artificial Sequence
  SAMD9 targeting guide sequence portion
gaaauuggagaaaagguaacca

SEQ ID NO: 4288 - RNA, 22 nt, Artificial Sequence
  SAMD9 targeting guide sequence portion
gagaaaagguaaccaguuuaau

SEQ ID NO: 4289 - RNA, 22 nt, Artificial Sequence
  SAMD9 targeting guide sequence portion
gauuaaacugguuaccuuuucu

SEQ ID NO: 4290 - RNA, 22 nt, Artificial Sequence
  SAMD9 targeting guide sequence portion
gauuuuucugaaauuggagaaa

SEQ ID NO: 4291 - RNA, 22 nt, Artificial Sequence
  SAMD9 targeting guide sequence portion
ggagaaaagguaaccaguuuaa

SEQ ID NO: 4292 - RNA, 22 nt, Artificial Sequence
  SAMD9 targeting guide sequence portion
ggauuuuucugaaauuggagaa

SEQ ID NO: 4293 - RNA, 22 nt, Artificial Sequence
  SAMD9 targeting guide sequence portion
ggugauuaaacugguuaccuuu

SEQ ID NO: 4294 - RNA, 22 nt, Artificial Sequence
  SAMD9 targeting guide sequence portion
gguuaccuuuucuccaauuuca

SEQ ID NO: 4295 - RNA, 22 nt, Artificial Sequence
  SAMD9 targeting guide sequence portion
gugauuaaacugguuaccuuuu

SEQ ID NO: 4296 - RNA, 22 nt, Artificial Sequence
  SAMD9 targeting guide sequence portion
guggauuuuucugaaauuggag

SEQ ID NO: 4297 - RNA, 22 nt, Artificial Sequence
  SAMD9 targeting guide sequence portion
guuaccuuuucuccaauuucag

SEQ ID NO: 4298 - RNA, 22 nt, Artificial Sequence
  SAMD9 targeting guide sequence portion
uaaacugguuaccuuuucucca

SEQ ID NO: 4299 - RNA, 22 nt, Artificial Sequence
  SAMD9 targeting guide sequence portion
uaccuuuucuccaauuucagaa

SEQ ID NO: 4300 - RNA, 22 nt, Artificial Sequence
  SAMD9 targeting guide sequence portion
uaggugauuaaacugguuaccu

SEQ ID NO: 4301 - RNA, 22 nt, Artificial Sequence
  SAMD9 targeting guide sequence portion
ucugaaauuggagaaaagguaa

SEQ ID NO: 4302 - RNA, 22 nt, Artificial Sequence
  SAMD9 targeting guide sequence portion
ugaaauuggagaaaagguaacc

SEQ ID NO: 4303 - RNA, 22 nt, Artificial Sequence
  SAMD9 targeting guide sequence portion
ugauuaaacugguuaccuuuuc

SEQ ID NO: 4304 - RNA, 22 nt, Artificial Sequence
  SAMD9 targeting guide sequence portion
uggagaaaagguaaccaguuua

SEQ ID NO: 4305 - RNA, 22 nt, Artificial Sequence
  SAMD9 targeting guide sequence portion
uggauuuuucugaaauuggaga

SEQ ID NO: 4306 - RNA, 22 nt, Artificial Sequence
  SAMD9 targeting guide sequence portion
ugguuaccuuuucuccaauuuc

SEQ ID NO: 4307 - RNA, 22 nt, Artificial Sequence
  SAMD9 targeting guide sequence portion
uuaaacugguuaccuuuucucc

SEQ ID NO: 4308 - RNA, 22 nt, Artificial Sequence
  SAMD9 targeting guide sequence portion
uuaccuuuucuccaauuucaga

SEQ ID NO: 4309 - RNA, 22 nt, Artificial Sequence
  SAMD9 targeting guide sequence portion
uucugaaauuggagaaaaggua

SEQ ID NO: 4310 - RNA, 22 nt, Artificial Sequence
  SAMD9 targeting guide sequence portion
uuggagaaaagguaaccaguuu

SEQ ID NO: 4311 - RNA, 22 nt, Artificial Sequence
  SAMD9 targeting guide sequence portion
uuucuccaauuucagaaaaauc

SEQ ID NO: 4312 - RNA, 22 nt, Artificial Sequence
  SAMD9 targeting guide sequence portion
uuucugaaauuggagaaaaggu

SEQ ID NO: 4313 - RNA, 22 nt, Artificial Sequence
  SAMD9 targeting guide sequence portion
uuuucuccaauuucagaaaaau

SEQ ID NO: 4314 - RNA, 22 nt, Artificial Sequence
  SAMD9 targeting guide sequence portion
uuuucugaaauuggagaaaagg

SEQ ID NO: 4315 - RNA, 22 nt, Artificial Sequence
  SAMD9 targeting guide sequence portion
uuuuucugaaauuggagaaaag

SEQ ID NO: 4316 - RNA, 20 nt, Artificial Sequence
  SAMD9 targeting guide sequence portion
aaaaacaagacagugaauuu

SEQ ID NO: 4317 - RNA, 20 nt, Artificial Sequence
  SAMD9 targeting guide sequence portion
aaaaauucacugucuuguuu

SEQ ID NO: 4318 - RNA, 20 nt, Artificial Sequence
  SAMD9 targeting guide sequence portion
aaaacaagacagugaauuuu

SEQ ID NO: 4319 - RNA, 20 nt, Artificial Sequence
  SAMD9 targeting guide sequence portion
aaaauucacugucuuguuuu

SEQ ID NO: 4320 - RNA, 20 nt, Artificial Sequence
  SAMD9 targeting guide sequence portion
aaacaagacagugaauuuuu

SEQ ID NO: 4321 - RNA, 20 nt, Artificial Sequence
  SAMD9 targeting guide sequence portion
aaauucacugucuuguuuuu

SEQ ID NO: 4322 - RNA, 20 nt, Artificial Sequence
  SAMD9 targeting guide sequence portion
aacaagacagugaauuuuuc

SEQ ID NO: 4323 - RNA, 20 nt, Artificial Sequence
  SAMD9 targeting guide sequence portion
aagacagugaauuuuucuga

SEQ ID NO: 4324 - RNA, 20 nt, Artificial Sequence
  SAMD9 targeting guide sequence portion
aauucacugucuuguuuuuc

SEQ ID NO: 4325 - RNA, 20 nt, Artificial Sequence
  SAMD9 targeting guide sequence portion
aauuucagaaaaauucacug

SEQ ID NO: 4326 - RNA, 20 nt, Artificial Sequence
  SAMD9 targeting guide sequence portion
aauuuuucugaaauuggaga

SEQ ID NO: 4327 - RNA, 20 nt, Artificial Sequence
  SAMD9 targeting guide sequence portion
acaagacagugaauuuuucu

SEQ ID NO: 4328 - RNA, 20 nt, Artificial Sequence
  SAMD9 targeting guide sequence portion
acagugaauuuuucugaaau

SEQ ID NO: 4329 - RNA, 20 nt, Artificial Sequence
  SAMD9 targeting guide sequence portion
accuguucuccaauuucaga

SEQ ID NO: 4330 - RNA, 20 nt, Artificial Sequence
  SAMD9 targeting guide sequence portion
agaaaaauucacugucuugu

SEQ ID NO: 4331 - RNA, 20 nt, Artificial Sequence
  SAMD9 targeting guide sequence portion
agacagugaauuuuucugaa

SEQ ID NO: 4332 - RNA, 20 nt, Artificial Sequence
  SAMD9 targeting guide sequence portion
agugaauuuuucugaaauug

SEQ ID NO: 4333 - RNA, 20 nt, Artificial Sequence
  SAMD9 targeting guide sequence portion
auucacugucuuguuuuuca

SEQ ID NO: 4334 - RNA, 20 nt, Artificial Sequence
  SAMD9 targeting guide sequence portion
auuucagaaaaauucacugu

SEQ ID NO: 4335 - RNA, 20 nt, Artificial Sequence
  SAMD9 targeting guide sequence portion
caagacagugaauuuuucug

SEQ ID NO: 4336 - RNA, 20 nt, Artificial Sequence
  SAMD9 targeting guide sequence portion
caauuucagaaaaauucacu

SEQ ID NO: 4337 - RNA, 20 nt, Artificial Sequence
  SAMD9 targeting guide sequence portion
cagaaaaauucacugucuug

SEQ ID NO: 4338 - RNA, 20 nt, Artificial Sequence
  SAMD9 targeting guide sequence portion
cagugaauuuuucugaaauu

SEQ ID NO: 4339 - RNA, 20 nt, Artificial Sequence
  SAMD9 targeting guide sequence portion
ccaauuucagaaaaauucac

SEQ ID NO: 4340 - RNA, 20 nt, Artificial Sequence
  SAMD9 targeting guide sequence portion
ccuguucuccaauuucagaa

SEQ ID NO: 4341 - RNA, 20 nt, Artificial Sequence
  SAMD9 targeting guide sequence portion
cuccaauuucagaaaaauuc

SEQ ID NO: 4342 - RNA, 20 nt, Artificial Sequence
  SAMD9 targeting guide sequence portion
cugaaaaacaagacagugaa

SEQ ID NO: 4343 - RNA, 20 nt, Artificial Sequence
  SAMD9 targeting guide sequence portion
cugugcugaaaaacaagaca

SEQ ID NO: 4344 - RNA, 20 nt, Artificial Sequence
  SAMD9 targeting guide sequence portion
cuguucuccaauuucagaaa

SEQ ID NO: 4345 - RNA, 20 nt, Artificial Sequence
  SAMD9 targeting guide sequence portion
gaaaaacaagacagugaauu

SEQ ID NO: 4346 - RNA, 20 nt, Artificial Sequence
  SAMD9 targeting guide sequence portion
gaaaaauucacugucuuguu

SEQ ID NO: 4347 - RNA, 20 nt, Artificial Sequence
  SAMD9 targeting guide sequence portion
gaauuuuucugaaauuggag

SEQ ID NO: 4348 - RNA, 20 nt, Artificial Sequence
  SAMD9 targeting guide sequence portion
gacagugaauuuuucugaaa

SEQ ID NO: 4349 - RNA, 20 nt, Artificial Sequence
  SAMD9 targeting guide sequence portion
gcugaaaaacaagacaguga

SEQ ID NO: 4350 - RNA, 20 nt, Artificial Sequence
  SAMD9 targeting guide sequence portion
gcugugcugaaaaacaagac

SEQ ID NO: 4351 - RNA, 20 nt, Artificial Sequence
  SAMD9 targeting guide sequence portion
gugaauuuuucugaaauugg

SEQ ID NO: 4352 - RNA, 20 nt, Artificial Sequence
  SAMD9 targeting guide sequence portion
gugcugaaaaacaagacagu

SEQ ID NO: 4353 - RNA, 20 nt, Artificial Sequence
  SAMD9 targeting guide sequence portion
guucuccaauuucagaaaaa

SEQ ID NO: 4354 - RNA, 20 nt, Artificial Sequence
  SAMD9 targeting guide sequence portion
ucacugucuuguuuuucagc

SEQ ID NO: 4355 - RNA, 20 nt, Artificial Sequence
  SAMD9 targeting guide sequence portion
ucagaaaaauucacugucuu

SEQ ID NO: 4356 - RNA, 20 nt, Artificial Sequence
  SAMD9 targeting guide sequence portion
uccaauuucagaaaaauuca

SEQ ID NO: 4357 - RNA, 20 nt, Artificial Sequence
  SAMD9 targeting guide sequence portion
ucuccaauuucagaaaaauu

SEQ ID NO: 4358 - RNA, 20 nt, Artificial Sequence
  SAMD9 targeting guide sequence portion
ugaaaaacaagacagugaau

SEQ ID NO: 4359 - RNA, 20 nt, Artificial Sequence
  SAMD9 targeting guide sequence portion
ugaauuuuucugaaauugga

SEQ ID NO: 4360 - RNA, 20 nt, Artificial Sequence
  SAMD9 targeting guide sequence portion
ugcugaaaaacaagacagug

SEQ ID NO: 4361 - RNA, 20 nt, Artificial Sequence
  SAMD9 targeting guide sequence portion
ugcugugcugaaaaacaaga

SEQ ID NO: 4362 - RNA, 20 nt, Artificial Sequence
  SAMD9 targeting guide sequence portion
ugugcugaaaaacaagacag

SEQ ID NO: 4363 - RNA, 20 nt, Artificial Sequence
  SAMD9 targeting guide sequence portion
uguucuccaauuucagaaaa

SEQ ID NO: 4364 - RNA, 20 nt, Artificial Sequence
  SAMD9 targeting guide sequence portion
uucacugucuuguuuuucag

SEQ ID NO: 4365 - RNA, 20 nt, Artificial Sequence
  SAMD9 targeting guide sequence portion
uucagaaaaauucacugucu

SEQ ID NO: 4366 - RNA, 20 nt, Artificial Sequence
  SAMD9 targeting guide sequence portion
uucuccaauuucagaaaaau

SEQ ID NO: 4367 - RNA, 20 nt, Artificial Sequence
  SAMD9 targeting guide sequence portion
uuucagaaaaauucacuguc

SEQ ID NO: 4368 - RNA, 21 nt, Artificial Sequence
  SAMD9 targeting guide sequence portion
aaaaacaagacagugaauuuu

SEQ ID NO: 4369 - RNA, 21 nt, Artificial Sequence
  SAMD9 targeting guide sequence portion
aaaaauucacugucuuguuuu

SEQ ID NO: 4370 - RNA, 21 nt, Artificial Sequence
  SAMD9 targeting guide sequence portion
aaaacaagacagugaauuuuu

SEQ ID NO: 4371 - RNA, 21 nt, Artificial Sequence
  SAMD9 targeting guide sequence portion
aaaauucacugucuuguuuuu

SEQ ID NO: 4372 - RNA, 21 nt, Artificial Sequence
  SAMD9 targeting guide sequence portion
aaacaagacagugaauuuuuc

SEQ ID NO: 4373 - RNA, 21 nt, Artificial Sequence
  SAMD9 targeting guide sequence portion
aaauucacugucuuguuuuuc

SEQ ID NO: 4374 - RNA, 21 nt, Artificial Sequence
  SAMD9 targeting guide sequence portion
aacaagacagugaauuuuucu

SEQ ID NO: 4375 - RNA, 21 nt, Artificial Sequence
  SAMD9 targeting guide sequence portion
aagacagugaauuuuucugaa

SEQ ID NO: 4376 - RNA, 21 nt, Artificial Sequence
  SAMD9 targeting guide sequence portion
aauucacugucuuguuuuuca

SEQ ID NO: 4377 - RNA, 21 nt, Artificial Sequence
  SAMD9 targeting guide sequence portion
aauuucagaaaaauucacugu

SEQ ID NO: 4378 - RNA, 21 nt, Artificial Sequence
  SAMD9 targeting guide sequence portion
aauuuuucugaaauuggagaa

SEQ ID NO: 4379 - RNA, 21 nt, Artificial Sequence
  SAMD9 targeting guide sequence portion
acaagacagugaauuuuucug

SEQ ID NO: 4380 - RNA, 21 nt, Artificial Sequence
  SAMD9 targeting guide sequence portion
acagugaauuuuucugaaauu

SEQ ID NO: 4381 - RNA, 21 nt, Artificial Sequence
  SAMD9 targeting guide sequence portion
accuguucuccaauuucagaa

SEQ ID NO: 4382 - RNA, 21 nt, Artificial Sequence
  SAMD9 targeting guide sequence portion
agaaaaauucacugucuuguu

SEQ ID NO: 4383 - RNA, 21 nt, Artificial Sequence
  SAMD9 targeting guide sequence portion
agacagugaauuuuucugaaa

SEQ ID NO: 4384 - RNA, 21 nt, Artificial Sequence
  SAMD9 targeting guide sequence portion
agugaauuuuucugaaauugg

SEQ ID NO: 4385 - RNA, 21 nt, Artificial Sequence
  SAMD9 targeting guide sequence portion
auucacugucuuguuuuucag

SEQ ID NO: 4386 - RNA, 21 nt, Artificial Sequence
  SAMD9 targeting guide sequence portion
auuucagaaaaauucacuguc

SEQ ID NO: 4387 - RNA, 21 nt, Artificial Sequence
  SAMD9 targeting guide sequence portion
caagacagugaauuuuucuga

SEQ ID NO: 4388 - RNA, 21 nt, Artificial Sequence
  SAMD9 targeting guide sequence portion
caauuucagaaaaauucacug

SEQ ID NO: 4389 - RNA, 21 nt, Artificial Sequence
  SAMD9 targeting guide sequence portion
cagaaaaauucacugucuugu

SEQ ID NO: 4390 - RNA, 21 nt, Artificial Sequence
  SAMD9 targeting guide sequence portion
cagugaauuuuucugaaauug

SEQ ID NO: 4391 - RNA, 21 nt, Artificial Sequence
  SAMD9 targeting guide sequence portion
ccaauuucagaaaaauucacu

SEQ ID NO: 4392 - RNA, 21 nt, Artificial Sequence
  SAMD9 targeting guide sequence portion
ccuguucuccaauuucagaaa

SEQ ID NO: 4393 - RNA, 21 nt, Artificial Sequence
  SAMD9 targeting guide sequence portion
cuccaauuucagaaaaauuca

SEQ ID NO: 4394 - RNA, 21 nt, Artificial Sequence
  SAMD9 targeting guide sequence portion
cugaaaaacaagacagugaau

SEQ ID NO: 4395 - RNA, 21 nt, Artificial Sequence
  SAMD9 targeting guide sequence portion
cugugcugaaaaacaagacag

SEQ ID NO: 4396 - RNA, 21 nt, Artificial Sequence
  SAMD9 targeting guide sequence portion
cuguucuccaauuucagaaaa

SEQ ID NO: 4397 - RNA, 21 nt, Artificial Sequence
  SAMD9 targeting guide sequence portion
gaaaaacaagacagugaauuu

SEQ ID NO: 4398 - RNA, 21 nt, Artificial Sequence
  SAMD9 targeting guide sequence portion
gaaaaauucacugucuuguuu

SEQ ID NO: 4399 - RNA, 21 nt, Artificial Sequence
  SAMD9 targeting guide sequence portion
gaauuuuucugaaauuggaga

SEQ ID NO: 4400 - RNA, 21 nt, Artificial Sequence
  SAMD9 targeting guide sequence portion
gacagugaauuuuucugaaau

SEQ ID NO: 4401 - RNA, 21 nt, Artificial Sequence
  SAMD9 targeting guide sequence portion
gcugaaaaacaagacagugaa

SEQ ID NO: 4402 - RNA, 21 nt, Artificial Sequence
  SAMD9 targeting guide sequence portion
gcugugcugaaaaacaagaca

SEQ ID NO: 4403 - RNA, 21 nt, Artificial Sequence
  SAMD9 targeting guide sequence portion
gugaauuuuucugaaauugga

SEQ ID NO: 4404 - RNA, 21 nt, Artificial Sequence
  SAMD9 targeting guide sequence portion
gugcugaaaaacaagacagug

SEQ ID NO: 4405 - RNA, 21 nt, Artificial Sequence
  SAMD9 targeting guide sequence portion
gugcugugcugaaaaacaaga

SEQ ID NO: 4406 - RNA, 21 nt, Artificial Sequence
  SAMD9 targeting guide sequence portion
guucuccaauuucagaaaaau

SEQ ID NO: 4407 - RNA, 21 nt, Artificial Sequence
  SAMD9 targeting guide sequence portion
uaccuguucuccaauuucaga

SEQ ID NO: 4408 - RNA, 21 nt, Artificial Sequence
  SAMD9 targeting guide sequence portion
ucacugucuuguuuuucagca

SEQ ID NO: 4409 - RNA, 21 nt, Artificial Sequence
  SAMD9 targeting guide sequence portion
ucagaaaaauucacugucuug

SEQ ID NO: 4410 - RNA, 21 nt, Artificial Sequence
  SAMD9 targeting guide sequence portion
uccaauuucagaaaaauucac

SEQ ID NO: 4411 - RNA, 21 nt, Artificial Sequence
  SAMD9 targeting guide sequence portion
ucuccaauuucagaaaaauuc

SEQ ID NO: 4412 - RNA, 21 nt, Artificial Sequence
  SAMD9 targeting guide sequence portion
ugaaaaacaagacagugaauu

SEQ ID NO: 4413 - RNA, 21 nt, Artificial Sequence
  SAMD9 targeting guide sequence portion
ugaauuuuucugaaauuggag

SEQ ID NO: 4414 - RNA, 21 nt, Artificial Sequence
  SAMD9 targeting guide sequence portion
ugcugaaaaacaagacaguga

SEQ ID NO: 4415 - RNA, 21 nt, Artificial Sequence
  SAMD9 targeting guide sequence portion
ugcugugcugaaaaacaagac

SEQ ID NO: 4416 - RNA, 21 nt, Artificial Sequence
  SAMD9 targeting guide sequence portion
ugugcugaaaaacaagacagu

SEQ ID NO: 4417 - RNA, 21 nt, Artificial Sequence
  SAMD9 targeting guide sequence portion
uguucuccaauuucagaaaaa

SEQ ID NO: 4418 - RNA, 21 nt, Artificial Sequence
  SAMD9 targeting guide sequence portion
uucacugucuuguuuuucagc

SEQ ID NO: 4419 - RNA, 21 nt, Artificial Sequence
  SAMD9 targeting guide sequence portion
uucagaaaaauucacugucuu

SEQ ID NO: 4420 - RNA, 21 nt, Artificial Sequence
  SAMD9 targeting guide sequence portion
uucuccaauuucagaaaaauu

SEQ ID NO: 4421 - RNA, 21 nt, Artificial Sequence
  SAMD9 targeting guide sequence portion
uuucagaaaaauucacugucu

SEQ ID NO: 4422 - RNA, 22 nt, Artificial Sequence
  SAMD9 targeting guide sequence portion
aaaaacaagacagugaauuuuu

SEQ ID NO: 4423 - RNA, 22 nt, Artificial Sequence
  SAMD9 targeting guide sequence portion
aaaaauucacugucuuguuuuu

SEQ ID NO: 4424 - RNA, 22 nt, Artificial Sequence
  SAMD9 targeting guide sequence portion
aaaacaagacagugaauuuuuc

SEQ ID NO: 4425 - RNA, 22 nt, Artificial Sequence
  SAMD9 targeting guide sequence portion
aaaauucacugucuuguuuuuc

SEQ ID NO: 4426 - RNA, 22 nt, Artificial Sequence
  SAMD9 targeting guide sequence portion
aaacaagacagugaauuuuucu

SEQ ID NO: 4427 - RNA, 22 nt, Artificial Sequence
  SAMD9 targeting guide sequence portion
aaauucacugucuuguuuuuca

SEQ ID NO: 4428 - RNA, 22 nt, Artificial Sequence
  SAMD9 targeting guide sequence portion
aacaagacagugaauuuuucug

SEQ ID NO: 4429 - RNA, 22 nt, Artificial Sequence
  SAMD9 targeting guide sequence portion
aagacagugaauuuuucugaaa

SEQ ID NO: 4430 - RNA, 22 nt, Artificial Sequence
  SAMD9 targeting guide sequence portion
aauucacugucuuguuuuucag

SEQ ID NO: 4431 - RNA, 22 nt, Artificial Sequence
  SAMD9 targeting guide sequence portion
aauuucagaaaaauucacuguc

SEQ ID NO: 4432 - RNA, 22 nt, Artificial Sequence
  SAMD9 targeting guide sequence portion
aauuuuucugaaauuggagaac

SEQ ID NO: 4433 - RNA, 22 nt, Artificial Sequence
  SAMD9 targeting guide sequence portion
acaagacagugaauuuuucuga

SEQ ID NO: 4434 - RNA, 22 nt, Artificial Sequence
  SAMD9 targeting guide sequence portion
acagugaauuuuucugaaauug

SEQ ID NO: 4435 - RNA, 22 nt, Artificial Sequence
  SAMD9 targeting guide sequence portion
accuguucuccaauuucagaaa

SEQ ID NO: 4436 - RNA, 22 nt, Artificial Sequence
  SAMD9 targeting guide sequence portion
agaaaaauucacugucuuguuu

SEQ ID NO: 4437 - RNA, 22 nt, Artificial Sequence
  SAMD9 targeting guide sequence portion
agacagugaauuuuucugaaau

SEQ ID NO: 4438 - RNA, 22 nt, Artificial Sequence
  SAMD9 targeting guide sequence portion
agugaauuuuucugaaauugga

SEQ ID NO: 4439 - RNA, 22 nt, Artificial Sequence
  SAMD9 targeting guide sequence portion
auucacugucuuguuuuucagc

SEQ ID NO: 4440 - RNA, 22 nt, Artificial Sequence
  SAMD9 targeting guide sequence portion
auuucagaaaaauucacugucu

SEQ ID NO: 4441 - RNA, 22 nt, Artificial Sequence
  SAMD9 targeting guide sequence portion
caagacagugaauuuuucugaa

SEQ ID NO: 4442 - RNA, 22 nt, Artificial Sequence
  SAMD9 targeting guide sequence portion
caauuucagaaaaauucacugu

SEQ ID NO: 4443 - RNA, 22 nt, Artificial Sequence
  SAMD9 targeting guide sequence portion
cagaaaaauucacugucuuguu

SEQ ID NO: 4444 - RNA, 22 nt, Artificial Sequence
  SAMD9 targeting guide sequence portion
cagugaauuuuucugaaauugg

SEQ ID NO: 4445 - RNA, 22 nt, Artificial Sequence
  SAMD9 targeting guide sequence portion
ccaauuucagaaaaauucacug

SEQ ID NO: 4446 - RNA, 22 nt, Artificial Sequence
  SAMD9 targeting guide sequence portion
ccuguucuccaauuucagaaaa

SEQ ID NO: 4447 - RNA, 22 nt, Artificial Sequence
  SAMD9 targeting guide sequence portion
cuccaauuucagaaaaauucac

SEQ ID NO: 4448 - RNA, 22 nt, Artificial Sequence
  SAMD9 targeting guide sequence portion
cugaaaaacaagacagugaauu

SEQ ID NO: 4449 - RNA, 22 nt, Artificial Sequence
  SAMD9 targeting guide sequence portion
cugugcugaaaaacaagacagu

SEQ ID NO: 4450 - RNA, 22 nt, Artificial Sequence
  SAMD9 targeting guide sequence portion
cuguucuccaauuucagaaaaa

SEQ ID NO: 4451 - RNA, 22 nt, Artificial Sequence
  SAMD9 targeting guide sequence portion
gaaaaacaagacagugaauuuu

SEQ ID NO: 4452 - RNA, 22 nt, Artificial Sequence
  SAMD9 targeting guide sequence portion
gaaaaauucacugucuuguuuu

SEQ ID NO: 4453 - RNA, 22 nt, Artificial Sequence
  SAMD9 targeting guide sequence portion
gaauuuuucugaaauuggagaa

SEQ ID NO: 4454 - RNA, 22 nt, Artificial Sequence
  SAMD9 targeting guide sequence portion
gacagugaauuuuucugaaauu

SEQ ID NO: 4455 - RNA, 22 nt, Artificial Sequence
  SAMD9 targeting guide sequence portion
gcugaaaaacaagacagugaau

SEQ ID NO: 4456 - RNA, 22 nt, Artificial Sequence
  SAMD9 targeting guide sequence portion
gcugugcugaaaaacaagacag

SEQ ID NO: 4457 - RNA, 22 nt, Artificial Sequence
  SAMD9 targeting guide sequence portion
gugaauuuuucugaaauuggag

SEQ ID NO: 4458 - RNA, 22 nt, Artificial Sequence
  SAMD9 targeting guide sequence portion
gugcugaaaaacaagacaguga

SEQ ID NO: 4459 - RNA, 22 nt, Artificial Sequence
  SAMD9 targeting guide sequence portion
gugcugugcugaaaaacaagac

SEQ ID NO: 4460 - RNA, 22 nt, Artificial Sequence
  SAMD9 targeting guide sequence portion
guucuccaauuucagaaaaauu

SEQ ID NO: 4461 - RNA, 22 nt, Artificial Sequence
  SAMD9 targeting guide sequence portion
uaccuguucuccaauuucagaa

SEQ ID NO: 4462 - RNA, 22 nt, Artificial Sequence
  SAMD9 targeting guide sequence portion
ucacugucuuguuuuucagcac

SEQ ID NO: 4463 - RNA, 22 nt, Artificial Sequence
  SAMD9 targeting guide sequence portion
ucagaaaaauucacugucuugu

SEQ ID NO: 4464 - RNA, 22 nt, Artificial Sequence
  SAMD9 targeting guide sequence portion
uccaauuucagaaaaauucacu

SEQ ID NO: 4465 - RNA, 22 nt, Artificial Sequence
  SAMD9 targeting guide sequence portion
ucuccaauuucagaaaaauuca

SEQ ID NO: 4466 - RNA, 22 nt, Artificial Sequence
  SAMD9 targeting guide sequence portion
ugaaaaacaagacagugaauuu

SEQ ID NO: 4467 - RNA, 22 nt, Artificial Sequence
  SAMD9 targeting guide sequence portion
ugaauuuuucugaaauuggaga

SEQ ID NO: 4468 - RNA, 22 nt, Artificial Sequence
  SAMD9 targeting guide sequence portion
ugcugaaaaacaagacagugaa

SEQ ID NO: 4469 - RNA, 22 nt, Artificial Sequence
  SAMD9 targeting guide sequence portion
ugcugugcugaaaaacaagaca

SEQ ID NO: 4470 - RNA, 22 nt, Artificial Sequence
  SAMD9 targeting guide sequence portion
ugugcugaaaaacaagacagug

SEQ ID NO: 4471 - RNA, 22 nt, Artificial Sequence
  SAMD9 targeting guide sequence portion
ugugcugugcugaaaaacaaga

SEQ ID NO: 4472 - RNA, 22 nt, Artificial Sequence
  SAMD9 targeting guide sequence portion
uguucuccaauuucagaaaaau

SEQ ID NO: 4473 - RNA, 22 nt, Artificial Sequence
  SAMD9 targeting guide sequence portion
uuaccuguucuccaauuucaga

SEQ ID NO: 4474 - RNA, 22 nt, Artificial Sequence
  SAMD9 targeting guide sequence portion
uucacugucuuguuuuucagca

SEQ ID NO: 4475 - RNA, 22 nt, Artificial Sequence
  SAMD9 targeting guide sequence portion
uucagaaaaauucacugucuug

SEQ ID NO: 4476 - RNA, 22 nt, Artificial Sequence
  SAMD9 targeting guide sequence portion
uucuccaauuucagaaaaauuc

SEQ ID NO: 4477 - RNA, 22 nt, Artificial Sequence
  SAMD9 targeting guide sequence portion
uuucagaaaaauucacugucuu

SEQ ID NO: 4478 - RNA, 20 nt, Artificial Sequence
  SAMD9 targeting guide sequence portion
aaauucucugggaacuaagg

SEQ ID NO: 4479 - RNA, 20 nt, Artificial Sequence
  SAMD9 targeting guide sequence portion
aacuaccuuggcuaugcaaa

SEQ ID NO: 4480 - RNA, 20 nt, Artificial Sequence
  SAMD9 targeting guide sequence portion
aauucucugggaacuaagga

SEQ ID NO: 4481 - RNA, 20 nt, Artificial Sequence
  SAMD9 targeting guide sequence portion
aauuugcauagccaagguag

SEQ ID NO: 4482 - RNA, 20 nt, Artificial Sequence
  SAMD9 targeting guide sequence portion
accuuggcuaugcaaauucu

SEQ ID NO: 4483 - RNA, 20 nt, Artificial Sequence
  SAMD9 targeting guide sequence portion
acuaccuuggcuaugcaaau

SEQ ID NO: 4484 - RNA, 20 nt, Artificial Sequence
  SAMD9 targeting guide sequence portion
agaauuugcauagccaaggu

SEQ ID NO: 4485 - RNA, 20 nt, Artificial Sequence
  SAMD9 targeting guide sequence portion
agagaauuugcauagccaag

SEQ ID NO: 4486 - RNA, 20 nt, Artificial Sequence
  SAMD9 targeting guide sequence portion
aguucccagagaauuugcau

SEQ ID NO: 4487 - RNA, 20 nt, Artificial Sequence
  SAMD9 targeting guide sequence portion
augcaaauucucugggaacu

SEQ ID NO: 4488 - RNA, 20 nt, Artificial Sequence
  SAMD9 targeting guide sequence portion
auuucuuccuuaguucccag

SEQ ID NO: 4489 - RNA, 20 nt, Artificial Sequence
  SAMD9 targeting guide sequence portion
auuugcauagccaagguagu

SEQ ID NO: 4490 - RNA, 20 nt, Artificial Sequence
  SAMD9 targeting guide sequence portion
caaauucucugggaacuaag

SEQ ID NO: 4491 - RNA, 20 nt, Artificial Sequence
  SAMD9 targeting guide sequence portion
cagagaauuugcauagccaa

SEQ ID NO: 4492 - RNA, 20 nt, Artificial Sequence
  SAMD9 targeting guide sequence portion
ccagagaauuugcauagcca

SEQ ID NO: 4493 - RNA, 20 nt, Artificial Sequence
  SAMD9 targeting guide sequence portion
cccagagaauuugcauagcc

SEQ ID NO: 4494 - RNA, 20 nt, Artificial Sequence
  SAMD9 targeting guide sequence portion
ccuuaguucccagagaauuu

SEQ ID NO: 4495 - RNA, 20 nt, Artificial Sequence
  SAMD9 targeting guide sequence portion
ccuuggcuaugcaaauucuc

SEQ ID NO: 4496 - RNA, 20 nt, Artificial Sequence
  SAMD9 targeting guide sequence portion
cuaccuuggcuaugcaaauu

SEQ ID NO: 4497 - RNA, 20 nt, Artificial Sequence
  SAMD9 targeting guide sequence portion
cuaugcaaauucucugggaa

SEQ ID NO: 4498 - RNA, 20 nt, Artificial Sequence
  SAMD9 targeting guide sequence portion
cuuaguucccagagaauuug

SEQ ID NO: 4499 - RNA, 20 nt, Artificial Sequence
  SAMD9 targeting guide sequence portion
cuuccuuaguucccagagaa

SEQ ID NO: 4500 - RNA, 20 nt, Artificial Sequence
  SAMD9 targeting guide sequence portion
cuuggcuaugcaaauucucu

SEQ ID NO: 4501 - RNA, 20 nt, Artificial Sequence
  SAMD9 targeting guide sequence portion
gaacuaccuuggcuaugcaa

SEQ ID NO: 4502 - RNA, 20 nt, Artificial Sequence
  SAMD9 targeting guide sequence portion
gaauuugcauagccaaggua

SEQ ID NO: 4503 - RNA, 20 nt, Artificial Sequence
  SAMD9 targeting guide sequence portion
gagaauuugcauagccaagg

SEQ ID NO: 4504 - RNA, 20 nt, Artificial Sequence
  SAMD9 targeting guide sequence portion
gcaaauucucugggaacuaa

SEQ ID NO: 4505 - RNA, 20 nt, Artificial Sequence
  SAMD9 targeting guide sequence portion
gcuaugcaaauucucuggga

SEQ ID NO: 4506 - RNA, 20 nt, Artificial Sequence
  SAMD9 targeting guide sequence portion
ggaacuaccuuggcuaugca

SEQ ID NO: 4507 - RNA, 20 nt, Artificial Sequence
  SAMD9 targeting guide sequence portion
ggcuaugcaaauucucuggg

SEQ ID NO: 4508 - RNA, 20 nt, Artificial Sequence
  SAMD9 targeting guide sequence portion
gggaacuaccuuggcuaugc

SEQ ID NO: 4509 - RNA, 20 nt, Artificial Sequence
  SAMD9 targeting guide sequence portion
ggggaacuaccuuggcuaug

SEQ ID NO: 4510 - RNA, 20 nt, Artificial Sequence
  SAMD9 targeting guide sequence portion
gggggaacuaccuuggcuau

SEQ ID NO: 4511 - RNA, 20 nt, Artificial Sequence
  SAMD9 targeting guide sequence portion
gugggggaacuaccuuggcu

SEQ ID NO: 4512 - RNA, 20 nt, Artificial Sequence
  SAMD9 targeting guide sequence portion
guucccagagaauuugcaua

SEQ ID NO: 4513 - RNA, 20 nt, Artificial Sequence
  SAMD9 targeting guide sequence portion
uaccuuggcuaugcaaauuc

SEQ ID NO: 4514 - RNA, 20 nt, Artificial Sequence
  SAMD9 targeting guide sequence portion
uaguucccagagaauuugca

SEQ ID NO: 4515 - RNA, 20 nt, Artificial Sequence
  SAMD9 targeting guide sequence portion
uaugcaaauucucugggaac

SEQ ID NO: 4516 - RNA, 20 nt, Artificial Sequence
  SAMD9 targeting guide sequence portion
ucccagagaauuugcauagc

SEQ ID NO: 4517 - RNA, 20 nt, Artificial Sequence
  SAMD9 targeting guide sequence portion
uccuuaguucccagagaauu

SEQ ID NO: 4518 - RNA, 20 nt, Artificial Sequence
  SAMD9 targeting guide sequence portion
ucuuccuuaguucccagaga

SEQ ID NO: 4519 - RNA, 20 nt, Artificial Sequence
  SAMD9 targeting guide sequence portion
ugcaaauucucugggaacua

SEQ ID NO: 4520 - RNA, 20 nt, Artificial Sequence
  SAMD9 targeting guide sequence portion
uggcuaugcaaauucucugg

SEQ ID NO: 4521 - RNA, 20 nt, Artificial Sequence
  SAMD9 targeting guide sequence portion
ugggggaacuaccuuggcua

SEQ ID NO: 4522 - RNA, 20 nt, Artificial Sequence
  SAMD9 targeting guide sequence portion
uuaguucccagagaauuugc

SEQ ID NO: 4523 - RNA, 20 nt, Artificial Sequence
  SAMD9 targeting guide sequence portion
uucccagagaauuugcauag

SEQ ID NO: 4524 - RNA, 20 nt, Artificial Sequence
  SAMD9 targeting guide sequence portion
uuccuuaguucccagagaau

SEQ ID NO: 4525 - RNA, 20 nt, Artificial Sequence
  SAMD9 targeting guide sequence portion
uucuuccuuaguucccagag

SEQ ID NO: 4526 - RNA, 20 nt, Artificial Sequence
  SAMD9 targeting guide sequence portion
uugcauagccaagguaguuc

SEQ ID NO: 4527 - RNA, 20 nt, Artificial Sequence
  SAMD9 targeting guide sequence portion
uuggcuaugcaaauucucug

SEQ ID NO: 4528 - RNA, 20 nt, Artificial Sequence
  SAMD9 targeting guide sequence portion
uuucuuccuuaguucccaga

SEQ ID NO: 4529 - RNA, 20 nt, Artificial Sequence
  SAMD9 targeting guide sequence portion
uuugcauagccaagguaguu

SEQ ID NO: 4530 - RNA, 21 nt, Artificial Sequence
  SAMD9 targeting guide sequence portion
aaauucucugggaacuaagga

SEQ ID NO: 4531 - RNA, 21 nt, Artificial Sequence
  SAMD9 targeting guide sequence portion
aacuaccuuggcuaugcaaau

SEQ ID NO: 4532 - RNA, 21 nt, Artificial Sequence
  SAMD9 targeting guide sequence portion
aauucucugggaacuaaggaa

SEQ ID NO: 4533 - RNA, 21 nt, Artificial Sequence
  SAMD9 targeting guide sequence portion
aauuucuuccuuaguucccag

SEQ ID NO: 4534 - RNA, 21 nt, Artificial Sequence
  SAMD9 targeting guide sequence portion
aauuugcauagccaagguagu

SEQ ID NO: 4535 - RNA, 21 nt, Artificial Sequence
  SAMD9 targeting guide sequence portion
accuuggcuaugcaaauucuc

SEQ ID NO: 4536 - RNA, 21 nt, Artificial Sequence
  SAMD9 targeting guide sequence portion
acuaccuuggcuaugcaaauu

SEQ ID NO: 4537 - RNA, 21 nt, Artificial Sequence
  SAMD9 targeting guide sequence portion
agaauuugcauagccaaggua

SEQ ID NO: 4538 - RNA, 21 nt, Artificial Sequence
  SAMD9 targeting guide sequence portion
agagaauuugcauagccaagg

SEQ ID NO: 4539 - RNA, 21 nt, Artificial Sequence
  SAMD9 targeting guide sequence portion
aguucccagagaauuugcaua

SEQ ID NO: 4540 - RNA, 21 nt, Artificial Sequence
  SAMD9 targeting guide sequence portion
augcaaauucucugggaacua

SEQ ID NO: 4541 - RNA, 21 nt, Artificial Sequence
  SAMD9 targeting guide sequence portion
auuucuuccuuaguucccaga

SEQ ID NO: 4542 - RNA, 21 nt, Artificial Sequence
  SAMD9 targeting guide sequence portion
auuugcauagccaagguaguu

SEQ ID NO: 4543 - RNA, 21 nt, Artificial Sequence
  SAMD9 targeting guide sequence portion
caaauucucugggaacuaagg

SEQ ID NO: 4544 - RNA, 21 nt, Artificial Sequence
  SAMD9 targeting guide sequence portion
cagagaauuugcauagccaag

SEQ ID NO: 4545 - RNA, 21 nt, Artificial Sequence
  SAMD9 targeting guide sequence portion
ccagagaauuugcauagccaa

SEQ ID NO: 4546 - RNA, 21 nt, Artificial Sequence
  SAMD9 targeting guide sequence portion
cccagagaauuugcauagcca

SEQ ID NO: 4547 - RNA, 21 nt, Artificial Sequence
  SAMD9 targeting guide sequence portion
ccuuaguucccagagaauuug

SEQ ID NO: 4548 - RNA, 21 nt, Artificial Sequence
  SAMD9 targeting guide sequence portion
ccuuggcuaugcaaauucucu

SEQ ID NO: 4549 - RNA, 21 nt, Artificial Sequence
  SAMD9 targeting guide sequence portion
cuaccuuggcuaugcaaauuc

SEQ ID NO: 4550 - RNA, 21 nt, Artificial Sequence
  SAMD9 targeting guide sequence portion
cuaugcaaauucucugggaac

SEQ ID NO: 4551 - RNA, 21 nt, Artificial Sequence
  SAMD9 targeting guide sequence portion
cuuaguucccagagaauuugc

SEQ ID NO: 4552 - RNA, 21 nt, Artificial Sequence
  SAMD9 targeting guide sequence portion
cuuccuuaguucccagagaau

SEQ ID NO: 4553 - RNA, 21 nt, Artificial Sequence
  SAMD9 targeting guide sequence portion
cuuggcuaugcaaauucucug

SEQ ID NO: 4554 - RNA, 21 nt, Artificial Sequence
  SAMD9 targeting guide sequence portion
gaacuaccuuggcuaugcaaa

SEQ ID NO: 4555 - RNA, 21 nt, Artificial Sequence
  SAMD9 targeting guide sequence portion
gaauuugcauagccaagguag

SEQ ID NO: 4556 - RNA, 21 nt, Artificial Sequence
  SAMD9 targeting guide sequence portion
gagaauuugcauagccaaggu

SEQ ID NO: 4557 - RNA, 21 nt, Artificial Sequence
  SAMD9 targeting guide sequence portion
gcaaauucucugggaacuaag

SEQ ID NO: 4558 - RNA, 21 nt, Artificial Sequence
  SAMD9 targeting guide sequence portion
gcuaugcaaauucucugggaa

SEQ ID NO: 4559 - RNA, 21 nt, Artificial Sequence
  SAMD9 targeting guide sequence portion
ggaacuaccuuggcuaugcaa

SEQ ID NO: 4560 - RNA, 21 nt, Artificial Sequence
  SAMD9 targeting guide sequence portion
ggcuaugcaaauucucuggga

SEQ ID NO: 4561 - RNA, 21 nt, Artificial Sequence
  SAMD9 targeting guide sequence portion
gggaacuaccuuggcuaugca

SEQ ID NO: 4562 - RNA, 21 nt, Artificial Sequence
  SAMD9 targeting guide sequence portion
ggggaacuaccuuggcuaugc

SEQ ID NO: 4563 - RNA, 21 nt, Artificial Sequence
  SAMD9 targeting guide sequence portion
gggggaacuaccuuggcuaug

SEQ ID NO: 4564 - RNA, 21 nt, Artificial Sequence
  SAMD9 targeting guide sequence portion
gugggggaacuaccuuggcua

SEQ ID NO: 4565 - RNA, 21 nt, Artificial Sequence
  SAMD9 targeting guide sequence portion
guucccagagaauuugcauag

SEQ ID NO: 4566 - RNA, 21 nt, Artificial Sequence
  SAMD9 targeting guide sequence portion
uaccuuggcuaugcaaauucu

SEQ ID NO: 4567 - RNA, 21 nt, Artificial Sequence
  SAMD9 targeting guide sequence portion
uaguucccagagaauuugcau

SEQ ID NO: 4568 - RNA, 21 nt, Artificial Sequence
  SAMD9 targeting guide sequence portion
uaugcaaauucucugggaacu

SEQ ID NO: 4569 - RNA, 21 nt, Artificial Sequence
  SAMD9 targeting guide sequence portion
ucccagagaauuugcauagcc

SEQ ID NO: 4570 - RNA, 21 nt, Artificial Sequence
  SAMD9 targeting guide sequence portion
uccuuaguucccagagaauuu

SEQ ID NO: 4571 - RNA, 21 nt, Artificial Sequence
  SAMD9 targeting guide sequence portion
ucuuccuuaguucccagagaa

SEQ ID NO: 4572 - RNA, 21 nt, Artificial Sequence
  SAMD9 targeting guide sequence portion
ugcaaauucucugggaacuaa

SEQ ID NO: 4573 - RNA, 21 nt, Artificial Sequence
  SAMD9 targeting guide sequence portion
uggcuaugcaaauucucuggg

SEQ ID NO: 4574 - RNA, 21 nt, Artificial Sequence
  SAMD9 targeting guide sequence portion
ugggggaacuaccuuggcuau

SEQ ID NO: 4575 - RNA, 21 nt, Artificial Sequence
  SAMD9 targeting guide sequence portion
ugugggggaacuaccuuggcu

SEQ ID NO: 4576 - RNA, 21 nt, Artificial Sequence
  SAMD9 targeting guide sequence portion
uuaguucccagagaauuugca

SEQ ID NO: 4577 - RNA, 21 nt, Artificial Sequence
  SAMD9 targeting guide sequence portion
uucccagagaauuugcauagc

SEQ ID NO: 4578 - RNA, 21 nt, Artificial Sequence
  SAMD9 targeting guide sequence portion
uuccuuaguucccagagaauu

SEQ ID NO: 4579 - RNA, 21 nt, Artificial Sequence
  SAMD9 targeting guide sequence portion
uucuuccuuaguucccagaga

SEQ ID NO: 4580 - RNA, 21 nt, Artificial Sequence
  SAMD9 targeting guide sequence portion
uugcauagccaagguaguucc

SEQ ID NO: 4581 - RNA, 21 nt, Artificial Sequence
  SAMD9 targeting guide sequence portion
uuggcuaugcaaauucucugg

SEQ ID NO: 4582 - RNA, 21 nt, Artificial Sequence
  SAMD9 targeting guide sequence portion
uuucuuccuuaguucccagag

SEQ ID NO: 4583 - RNA, 21 nt, Artificial Sequence
  SAMD9 targeting guide sequence portion
uuugcauagccaagguaguuc

SEQ ID NO: 4584 - RNA, 22 nt, Artificial Sequence
  SAMD9 targeting guide sequence portion
aaauucucugggaacuaaggaa

SEQ ID NO: 4585 - RNA, 22 nt, Artificial Sequence
  SAMD9 targeting guide sequence portion
aacuaccuuggcuaugcaaauu

SEQ ID NO: 4586 - RNA, 22 nt, Artificial Sequence
  SAMD9 targeting guide sequence portion
aauucucugggaacuaaggaag

SEQ ID NO: 4587 - RNA, 22 nt, Artificial Sequence
  SAMD9 targeting guide sequence portion
aauuucuuccuuaguucccaga

SEQ ID NO: 4588 - RNA, 22 nt, Artificial Sequence
  SAMD9 targeting guide sequence portion
aauuugcauagccaagguaguu

SEQ ID NO: 4589 - RNA, 22 nt, Artificial Sequence
  SAMD9 targeting guide sequence portion
accuuggcuaugcaaauucucu

SEQ ID NO: 4590 - RNA, 22 nt, Artificial Sequence
  SAMD9 targeting guide sequence portion
acuaccuuggcuaugcaaauuc

SEQ ID NO: 4591 - RNA, 22 nt, Artificial Sequence
  SAMD9 targeting guide sequence portion
agaauuugcauagccaagguag

SEQ ID NO: 4592 - RNA, 22 nt, Artificial Sequence
  SAMD9 targeting guide sequence portion
agagaauuugcauagccaaggu

SEQ ID NO: 4593 - RNA, 22 nt, Artificial Sequence
  SAMD9 targeting guide sequence portion
aguucccagagaauuugcauag

SEQ ID NO: 4594 - RNA, 22 nt, Artificial Sequence
  SAMD9 targeting guide sequence portion
augcaaauucucugggaacuaa

SEQ ID NO: 4595 - RNA, 22 nt, Artificial Sequence
  SAMD9 targeting guide sequence portion
auuucuuccuuaguucccagag

SEQ ID NO: 4596 - RNA, 22 nt, Artificial Sequence
  SAMD9 targeting guide sequence portion
auuugcauagccaagguaguuc

SEQ ID NO: 4597 - RNA, 22 nt, Artificial Sequence
  SAMD9 targeting guide sequence portion
caaauucucugggaacuaagga

SEQ ID NO: 4598 - RNA, 22 nt, Artificial Sequence
  SAMD9 targeting guide sequence portion
cagagaauuugcauagccaagg

SEQ ID NO: 4599 - RNA, 22 nt, Artificial Sequence
  SAMD9 targeting guide sequence portion
ccagagaauuugcauagccaag

SEQ ID NO: 4600 - RNA, 22 nt, Artificial Sequence
  SAMD9 targeting guide sequence portion
cccagagaauuugcauagccaa

SEQ ID NO: 4601 - RNA, 22 nt, Artificial Sequence
  SAMD9 targeting guide sequence portion
ccuuaguucccagagaauuugc

SEQ ID NO: 4602 - RNA, 22 nt, Artificial Sequence
  SAMD9 targeting guide sequence portion
ccuuggcuaugcaaauucucug

SEQ ID NO: 4603 - RNA, 22 nt, Artificial Sequence
  SAMD9 targeting guide sequence portion
cuaccuuggcuaugcaaauucu

SEQ ID NO: 4604 - RNA, 22 nt, Artificial Sequence
  SAMD9 targeting guide sequence portion
cuaugcaaauucucugggaacu

SEQ ID NO: 4605 - RNA, 22 nt, Artificial Sequence
  SAMD9 targeting guide sequence portion
cugugggggaacuaccuuggcu

SEQ ID NO: 4606 - RNA, 22 nt, Artificial Sequence
  SAMD9 targeting guide sequence portion
cuuaguucccagagaauuugca

SEQ ID NO: 4607 - RNA, 22 nt, Artificial Sequence
  SAMD9 targeting guide sequence portion
cuuccuuaguucccagagaauu

SEQ ID NO: 4608 - RNA, 22 nt, Artificial Sequence
  SAMD9 targeting guide sequence portion
cuuggcuaugcaaauucucugg

SEQ ID NO: 4609 - RNA, 22 nt, Artificial Sequence
  SAMD9 targeting guide sequence portion
gaacuaccuuggcuaugcaaau

SEQ ID NO: 4610 - RNA, 22 nt, Artificial Sequence
  SAMD9 targeting guide sequence portion
gaauuucuuccuuaguucccag

SEQ ID NO: 4611 - RNA, 22 nt, Artificial Sequence
  SAMD9 targeting guide sequence portion
gaauuugcauagccaagguagu

SEQ ID NO: 4612 - RNA, 22 nt, Artificial Sequence
  SAMD9 targeting guide sequence portion
gagaauuugcauagccaaggua

SEQ ID NO: 4613 - RNA, 22 nt, Artificial Sequence
  SAMD9 targeting guide sequence portion
gcaaauucucugggaacuaagg

SEQ ID NO: 4614 - RNA, 22 nt, Artificial Sequence
  SAMD9 targeting guide sequence portion
gcuaugcaaauucucugggaac

SEQ ID NO: 4615 - RNA, 22 nt, Artificial Sequence
  SAMD9 targeting guide sequence portion
ggaacuaccuuggcuaugcaaa

SEQ ID NO: 4616 - RNA, 22 nt, Artificial Sequence
  SAMD9 targeting guide sequence portion
ggcuaugcaaauucucugggaa

SEQ ID NO: 4617 - RNA, 22 nt, Artificial Sequence
  SAMD9 targeting guide sequence portion
gggaacuaccuuggcuaugcaa

SEQ ID NO: 4618 - RNA, 22 nt, Artificial Sequence
  SAMD9 targeting guide sequence portion
ggggaacuaccuuggcuaugca

SEQ ID NO: 4619 - RNA, 22 nt, Artificial Sequence
  SAMD9 targeting guide sequence portion
gggggaacuaccuuggcuaugc

SEQ ID NO: 4620 - RNA, 22 nt, Artificial Sequence
  SAMD9 targeting guide sequence portion
gugggggaacuaccuuggcuau

SEQ ID NO: 4621 - RNA, 22 nt, Artificial Sequence
  SAMD9 targeting guide sequence portion
guucccagagaauuugcauagc

SEQ ID NO: 4622 - RNA, 22 nt, Artificial Sequence
  SAMD9 targeting guide sequence portion
uaccuuggcuaugcaaauucuc

SEQ ID NO: 4623 - RNA, 22 nt, Artificial Sequence
  SAMD9 targeting guide sequence portion
uaguucccagagaauuugcaua

SEQ ID NO: 4624 - RNA, 22 nt, Artificial Sequence
  SAMD9 targeting guide sequence portion
uaugcaaauucucugggaacua

SEQ ID NO: 4625 - RNA, 22 nt, Artificial Sequence
  SAMD9 targeting guide sequence portion
ucccagagaauuugcauagcca

SEQ ID NO: 4626 - RNA, 22 nt, Artificial Sequence
  SAMD9 targeting guide sequence portion
uccuuaguucccagagaauuug

SEQ ID NO: 4627 - RNA, 22 nt, Artificial Sequence
  SAMD9 targeting guide sequence portion
ucuuccuuaguucccagagaau

SEQ ID NO: 4628 - RNA, 22 nt, Artificial Sequence
  SAMD9 targeting guide sequence portion
ugcaaauucucugggaacuaag

SEQ ID NO: 4629 - RNA, 22 nt, Artificial Sequence
  SAMD9 targeting guide sequence portion
uggcuaugcaaauucucuggga

SEQ ID NO: 4630 - RNA, 22 nt, Artificial Sequence
  SAMD9 targeting guide sequence portion
ugggggaacuaccuuggcuaug

SEQ ID NO: 4631 - RNA, 22 nt, Artificial Sequence
  SAMD9 targeting guide sequence portion
ugugggggaacuaccuuggcua

SEQ ID NO: 4632 - RNA, 22 nt, Artificial Sequence
  SAMD9 targeting guide sequence portion
uuaguucccagagaauuugcau

SEQ ID NO: 4633 - RNA, 22 nt, Artificial Sequence
  SAMD9 targeting guide sequence portion
uucccagagaauuugcauagcc

SEQ ID NO: 4634 - RNA, 22 nt, Artificial Sequence
  SAMD9 targeting guide sequence portion
uuccuuaguucccagagaauuu

SEQ ID NO: 4635 - RNA, 22 nt, Artificial Sequence
  SAMD9 targeting guide sequence portion
uucuuccuuaguucccagagaa

SEQ ID NO: 4636 - RNA, 22 nt, Artificial Sequence
  SAMD9 targeting guide sequence portion
uugcauagccaagguaguuccc

SEQ ID NO: 4637 - RNA, 22 nt, Artificial Sequence
  SAMD9 targeting guide sequence portion
uuggcuaugcaaauucucuggg

SEQ ID NO: 4638 - RNA, 22 nt, Artificial Sequence
  SAMD9 targeting guide sequence portion
uuucuuccuuaguucccagaga

SEQ ID NO: 4639 - RNA, 22 nt, Artificial Sequence
  SAMD9 targeting guide sequence portion
uuugcauagccaagguaguucc

SEQ ID NO: 4640 - RNA, 20 nt, Artificial Sequence
  SAMD9 targeting guide sequence portion
aaaauuacucaucuguauca

SEQ ID NO: 4641 - RNA, 20 nt, Artificial Sequence
  SAMD9 targeting guide sequence portion
aaaccaacaaguaccaaaau

SEQ ID NO: 4642 - RNA, 20 nt, Artificial Sequence
  SAMD9 targeting guide sequence portion
aaauuacucaucuguaucau

SEQ ID NO: 4643 - RNA, 20 nt, Artificial Sequence
  SAMD9 targeting guide sequence portion
aacaaguaccaaaauuacuc

SEQ ID NO: 4644 - RNA, 20 nt, Artificial Sequence
  SAMD9 targeting guide sequence portion
aaccaacaaguaccaaaauu

SEQ ID NO: 4645 - RNA, 20 nt, Artificial Sequence
  SAMD9 targeting guide sequence portion
aaguaccaaaauuacucauc

SEQ ID NO: 4646 - RNA, 20 nt, Artificial Sequence
  SAMD9 targeting guide sequence portion
aauuacucaucuguaucauc

SEQ ID NO: 4647 - RNA, 20 nt, Artificial Sequence
  SAMD9 targeting guide sequence portion
acaaguaccaaaauuacuca

SEQ ID NO: 4648 - RNA, 20 nt, Artificial Sequence
  SAMD9 targeting guide sequence portion
acagaugaguaauuuuggua

SEQ ID NO: 4649 - RNA, 20 nt, Artificial Sequence
  SAMD9 targeting guide sequence portion
acagccuggaugaugauaca

SEQ ID NO: 4650 - RNA, 20 nt, Artificial Sequence
  SAMD9 targeting guide sequence portion
accaaaauuacucaucugua

SEQ ID NO: 4651 - RNA, 20 nt, Artificial Sequence
  SAMD9 targeting guide sequence portion
accaacaaguaccaaaauua

SEQ ID NO: 4652 - RNA, 20 nt, Artificial Sequence
  SAMD9 targeting guide sequence portion
acucaucuguaucaucaucc

SEQ ID NO: 4653 - RNA, 20 nt, Artificial Sequence
  SAMD9 targeting guide sequence portion
agaugaguaauuuugguacu

SEQ ID NO: 4654 - RNA, 20 nt, Artificial Sequence
  SAMD9 targeting guide sequence portion
agccuggaugaugauacaga

SEQ ID NO: 4655 - RNA, 20 nt, Artificial Sequence
  SAMD9 targeting guide sequence portion
aguaauuuugguacuuguug

SEQ ID NO: 4656 - RNA, 20 nt, Artificial Sequence
  SAMD9 targeting guide sequence portion
aguaccaaaauuacucaucu

SEQ ID NO: 4657 - RNA, 20 nt, Artificial Sequence
  SAMD9 targeting guide sequence portion
auacagaugaguaauuuugg

SEQ ID NO: 4658 - RNA, 20 nt, Artificial Sequence
  SAMD9 targeting guide sequence portion
augaguaauuuugguacuug

SEQ ID NO: 4659 - RNA, 20 nt, Artificial Sequence
  SAMD9 targeting guide sequence portion
augauacagaugaguaauuu

SEQ ID NO: 4660 - RNA, 20 nt, Artificial Sequence
  SAMD9 targeting guide sequence portion
augaugauacagaugaguaa

SEQ ID NO: 4661 - RNA, 20 nt, Artificial Sequence
  SAMD9 targeting guide sequence portion
auuacucaucuguaucauca

SEQ ID NO: 4662 - RNA, 20 nt, Artificial Sequence
  SAMD9 targeting guide sequence portion
caaaauuacucaucuguauc

SEQ ID NO: 4663 - RNA, 20 nt, Artificial Sequence
  SAMD9 targeting guide sequence portion
caacaaguaccaaaauuacu

SEQ ID NO: 4664 - RNA, 20 nt, Artificial Sequence
  SAMD9 targeting guide sequence portion
caaguaccaaaauuacucau

SEQ ID NO: 4665 - RNA, 20 nt, Artificial Sequence
  SAMD9 targeting guide sequence portion
cagaugaguaauuuugguac

SEQ ID NO: 4666 - RNA, 20 nt, Artificial Sequence
  SAMD9 targeting guide sequence portion
cagccuggaugaugauacag

SEQ ID NO: 4667 - RNA, 20 nt, Artificial Sequence
  SAMD9 targeting guide sequence portion
ccaaaauuacucaucuguau

SEQ ID NO: 4668 - RNA, 20 nt, Artificial Sequence
  SAMD9 targeting guide sequence portion
ccaacaaguaccaaaauuac

SEQ ID NO: 4669 - RNA, 20 nt, Artificial Sequence
  SAMD9 targeting guide sequence portion
ccuggaugaugauacagaug

SEQ ID NO: 4670 - RNA, 20 nt, Artificial Sequence
  SAMD9 targeting guide sequence portion
cuaaaccaacaaguaccaaa

SEQ ID NO: 4671 - RNA, 20 nt, Artificial Sequence
  SAMD9 targeting guide sequence portion
cucaucuguaucaucaucca

SEQ ID NO: 4672 - RNA, 20 nt, Artificial Sequence
  SAMD9 targeting guide sequence portion
cuggaugaugauacagauga

SEQ ID NO: 4673 - RNA, 20 nt, Artificial Sequence
  SAMD9 targeting guide sequence portion
gaguaauuuugguacuuguu

SEQ ID NO: 4674 - RNA, 20 nt, Artificial Sequence
  SAMD9 targeting guide sequence portion
gauacagaugaguaauuuug

SEQ ID NO: 4675 - RNA, 20 nt, Artificial Sequence
  SAMD9 targeting guide sequence portion
gaugaguaauuuugguacuu

SEQ ID NO: 4676 - RNA, 20 nt, Artificial Sequence
  SAMD9 targeting guide sequence portion
gaugauacagaugaguaauu

SEQ ID NO: 4677 - RNA, 20 nt, Artificial Sequence
  SAMD9 targeting guide sequence portion
gaugaugauacagaugagua

SEQ ID NO: 4678 - RNA, 20 nt, Artificial Sequence
  SAMD9 targeting guide sequence portion
gccuggaugaugauacagau

SEQ ID NO: 4679 - RNA, 20 nt, Artificial Sequence
  SAMD9 targeting guide sequence portion
ggaugaugauacagaugagu

SEQ ID NO: 4680 - RNA, 20 nt, Artificial Sequence
  SAMD9 targeting guide sequence portion
guaauuuugguacuuguugg

SEQ ID NO: 4681 - RNA, 20 nt, Artificial Sequence
  SAMD9 targeting guide sequence portion
guaccaaaauuacucaucug

SEQ ID NO: 4682 - RNA, 20 nt, Artificial Sequence
  SAMD9 targeting guide sequence portion
uaaaccaacaaguaccaaaa

SEQ ID NO: 4683 - RNA, 20 nt, Artificial Sequence
  SAMD9 targeting guide sequence portion
uacagaugaguaauuuuggu

SEQ ID NO: 4684 - RNA, 20 nt, Artificial Sequence
  SAMD9 targeting guide sequence portion
uaccaaaauuacucaucugu

SEQ ID NO: 4685 - RNA, 20 nt, Artificial Sequence
  SAMD9 targeting guide sequence portion
uacucaucuguaucaucauc

SEQ ID NO: 4686 - RNA, 20 nt, Artificial Sequence
  SAMD9 targeting guide sequence portion
ucuaaaccaacaaguaccaa

SEQ ID NO: 4687 - RNA, 20 nt, Artificial Sequence
  SAMD9 targeting guide sequence portion
ugaguaauuuugguacuugu

SEQ ID NO: 4688 - RNA, 20 nt, Artificial Sequence
  SAMD9 targeting guide sequence portion
ugauacagaugaguaauuuu

SEQ ID NO: 4689 - RNA, 20 nt, Artificial Sequence
  SAMD9 targeting guide sequence portion
ugaugauacagaugaguaau

SEQ ID NO: 4690 - RNA, 20 nt, Artificial Sequence
  SAMD9 targeting guide sequence portion
uggaugaugauacagaugag

SEQ ID NO: 4691 - RNA, 20 nt, Artificial Sequence
  SAMD9 targeting guide sequence portion
uuacucaucuguaucaucau

SEQ ID NO: 4692 - RNA, 21 nt, Artificial Sequence
  SAMD9 targeting guide sequence portion
aaaauuacucaucuguaucau

SEQ ID NO: 4693 - RNA, 21 nt, Artificial Sequence
  SAMD9 targeting guide sequence portion
aaaccaacaaguaccaaaauu

SEQ ID NO: 4694 - RNA, 21 nt, Artificial Sequence
  SAMD9 targeting guide sequence portion
aaauuacucaucuguaucauc

SEQ ID NO: 4695 - RNA, 21 nt, Artificial Sequence
  SAMD9 targeting guide sequence portion
aacaaguaccaaaauuacuca

SEQ ID NO: 4696 - RNA, 21 nt, Artificial Sequence
  SAMD9 targeting guide sequence portion
aaccaacaaguaccaaaauua

SEQ ID NO: 4697 - RNA, 21 nt, Artificial Sequence
  SAMD9 targeting guide sequence portion
aaguaccaaaauuacucaucu

SEQ ID NO: 4698 - RNA, 21 nt, Artificial Sequence
  SAMD9 targeting guide sequence portion
aauuacucaucuguaucauca

SEQ ID NO: 4699 - RNA, 21 nt, Artificial Sequence
  SAMD9 targeting guide sequence portion
acaaguaccaaaauuacucau

SEQ ID NO: 4700 - RNA, 21 nt, Artificial Sequence
  SAMD9 targeting guide sequence portion
acagaugaguaauuuugguac

SEQ ID NO: 4701 - RNA, 21 nt, Artificial Sequence
  SAMD9 targeting guide sequence portion
acagccuggaugaugauacag

SEQ ID NO: 4702 - RNA, 21 nt, Artificial Sequence
  SAMD9 targeting guide sequence portion
accaaaauuacucaucuguau

SEQ ID NO: 4703 - RNA, 21 nt, Artificial Sequence
  SAMD9 targeting guide sequence portion
accaacaaguaccaaaauuac

SEQ ID NO: 4704 - RNA, 21 nt, Artificial Sequence
  SAMD9 targeting guide sequence portion
acucaucuguaucaucaucca

SEQ ID NO: 4705 - RNA, 21 nt, Artificial Sequence
  SAMD9 targeting guide sequence portion
agaugaguaauuuugguacuu

SEQ ID NO: 4706 - RNA, 21 nt, Artificial Sequence
  SAMD9 targeting guide sequence portion
agccuggaugaugauacagau

SEQ ID NO: 4707 - RNA, 21 nt, Artificial Sequence
  SAMD9 targeting guide sequence portion
aguaauuuugguacuuguugg

SEQ ID NO: 4708 - RNA, 21 nt, Artificial Sequence
  SAMD9 targeting guide sequence portion
aguaccaaaauuacucaucug

SEQ ID NO: 4709 - RNA, 21 nt, Artificial Sequence
  SAMD9 targeting guide sequence portion
auacagaugaguaauuuuggu

SEQ ID NO: 4710 - RNA, 21 nt, Artificial Sequence
  SAMD9 targeting guide sequence portion
augaguaauuuugguacuugu

SEQ ID NO: 4711 - RNA, 21 nt, Artificial Sequence
  SAMD9 targeting guide sequence portion
augauacagaugaguaauuuu

SEQ ID NO: 4712 - RNA, 21 nt, Artificial Sequence
  SAMD9 targeting guide sequence portion
augaugauacagaugaguaau

SEQ ID NO: 4713 - RNA, 21 nt, Artificial Sequence
  SAMD9 targeting guide sequence portion
auuacucaucuguaucaucau

SEQ ID NO: 4714 - RNA, 21 nt, Artificial Sequence
  SAMD9 targeting guide sequence portion
caaaauuacucaucuguauca

SEQ ID NO: 4715 - RNA, 21 nt, Artificial Sequence
  SAMD9 targeting guide sequence portion
caacaaguaccaaaauuacuc

SEQ ID NO: 4716 - RNA, 21 nt, Artificial Sequence
  SAMD9 targeting guide sequence portion
caaguaccaaaauuacucauc

SEQ ID NO: 4717 - RNA, 21 nt, Artificial Sequence
  SAMD9 targeting guide sequence portion
cacagccuggaugaugauaca

SEQ ID NO: 4718 - RNA, 21 nt, Artificial Sequence
  SAMD9 targeting guide sequence portion
cagaugaguaauuuugguacu

SEQ ID NO: 4719 - RNA, 21 nt, Artificial Sequence
  SAMD9 targeting guide sequence portion
cagccuggaugaugauacaga

SEQ ID NO: 4720 - RNA, 21 nt, Artificial Sequence
  SAMD9 targeting guide sequence portion
ccaaaauuacucaucuguauc

SEQ ID NO: 4721 - RNA, 21 nt, Artificial Sequence
  SAMD9 targeting guide sequence portion
ccaacaaguaccaaaauuacu

SEQ ID NO: 4722 - RNA, 21 nt, Artificial Sequence
  SAMD9 targeting guide sequence portion
ccuggaugaugauacagauga

SEQ ID NO: 4723 - RNA, 21 nt, Artificial Sequence
  SAMD9 targeting guide sequence portion
cuaaaccaacaaguaccaaaa

SEQ ID NO: 4724 - RNA, 21 nt, Artificial Sequence
  SAMD9 targeting guide sequence portion
cucaucuguaucaucauccag

SEQ ID NO: 4725 - RNA, 21 nt, Artificial Sequence
  SAMD9 targeting guide sequence portion
cuggaugaugauacagaugag

SEQ ID NO: 4726 - RNA, 21 nt, Artificial Sequence
  SAMD9 targeting guide sequence portion
gaguaauuuugguacuuguug

SEQ ID NO: 4727 - RNA, 21 nt, Artificial Sequence
  SAMD9 targeting guide sequence portion
gauacagaugaguaauuuugg

SEQ ID NO: 4728 - RNA, 21 nt, Artificial Sequence
  SAMD9 targeting guide sequence portion
gaugaguaauuuugguacuug

SEQ ID NO: 4729 - RNA, 21 nt, Artificial Sequence
  SAMD9 targeting guide sequence portion
gaugauacagaugaguaauuu

SEQ ID NO: 4730 - RNA, 21 nt, Artificial Sequence
  SAMD9 targeting guide sequence portion
gaugaugauacagaugaguaa

SEQ ID NO: 4731 - RNA, 21 nt, Artificial Sequence
  SAMD9 targeting guide sequence portion
gccuggaugaugauacagaug

SEQ ID NO: 4732 - RNA, 21 nt, Artificial Sequence
  SAMD9 targeting guide sequence portion
ggaugaugauacagaugagua

SEQ ID NO: 4733 - RNA, 21 nt, Artificial Sequence
  SAMD9 targeting guide sequence portion
guaauuuugguacuuguuggu

SEQ ID NO: 4734 - RNA, 21 nt, Artificial Sequence
  SAMD9 targeting guide sequence portion
guaccaaaauuacucaucugu

SEQ ID NO: 4735 - RNA, 21 nt, Artificial Sequence
  SAMD9 targeting guide sequence portion
uaaaccaacaaguaccaaaau

SEQ ID NO: 4736 - RNA, 21 nt, Artificial Sequence
  SAMD9 targeting guide sequence portion
uacagaugaguaauuuuggua

SEQ ID NO: 4737 - RNA, 21 nt, Artificial Sequence
  SAMD9 targeting guide sequence portion
uaccaaaauuacucaucugua

SEQ ID NO: 4738 - RNA, 21 nt, Artificial Sequence
  SAMD9 targeting guide sequence portion
uacucaucuguaucaucaucc

SEQ ID NO: 4739 - RNA, 21 nt, Artificial Sequence
  SAMD9 targeting guide sequence portion
ucuaaaccaacaaguaccaaa

SEQ ID NO: 4740 - RNA, 21 nt, Artificial Sequence
  SAMD9 targeting guide sequence portion
ugaguaauuuugguacuuguu

SEQ ID NO: 4741 - RNA, 21 nt, Artificial Sequence
  SAMD9 targeting guide sequence portion
ugauacagaugaguaauuuug

SEQ ID NO: 4742 - RNA, 21 nt, Artificial Sequence
  SAMD9 targeting guide sequence portion
ugaugauacagaugaguaauu

SEQ ID NO: 4743 - RNA, 21 nt, Artificial Sequence
  SAMD9 targeting guide sequence portion
uggaugaugauacagaugagu

SEQ ID NO: 4744 - RNA, 21 nt, Artificial Sequence
  SAMD9 targeting guide sequence portion
uuacucaucuguaucaucauc

SEQ ID NO: 4745 - RNA, 21 nt, Artificial Sequence
  SAMD9 targeting guide sequence portion
uucuaaaccaacaaguaccaa

SEQ ID NO: 4746 - RNA, 22 nt, Artificial Sequence
  SAMD9 targeting guide sequence portion
aaaauuacucaucuguaucauc

SEQ ID NO: 4747 - RNA, 22 nt, Artificial Sequence
  SAMD9 targeting guide sequence portion
aaaccaacaaguaccaaaauua

SEQ ID NO: 4748 - RNA, 22 nt, Artificial Sequence
  SAMD9 targeting guide sequence portion
aaauuacucaucuguaucauca

SEQ ID NO: 4749 - RNA, 22 nt, Artificial Sequence
  SAMD9 targeting guide sequence portion
aacaaguaccaaaauuacucau

SEQ ID NO: 4750 - RNA, 22 nt, Artificial Sequence
  SAMD9 targeting guide sequence portion
aaccaacaaguaccaaaauuac

SEQ ID NO: 4751 - RNA, 22 nt, Artificial Sequence
  SAMD9 targeting guide sequence portion
aaguaccaaaauuacucaucug

SEQ ID NO: 4752 - RNA, 22 nt, Artificial Sequence
  SAMD9 targeting guide sequence portion
aauuacucaucuguaucaucau

SEQ ID NO: 4753 - RNA, 22 nt, Artificial Sequence
  SAMD9 targeting guide sequence portion
acaaguaccaaaauuacucauc

SEQ ID NO: 4754 - RNA, 22 nt, Artificial Sequence
  SAMD9 targeting guide sequence portion
acagaugaguaauuuugguacu

SEQ ID NO: 4755 - RNA, 22 nt, Artificial Sequence
  SAMD9 targeting guide sequence portion
acagccuggaugaugauacaga

SEQ ID NO: 4756 - RNA, 22 nt, Artificial Sequence
  SAMD9 targeting guide sequence portion
accaaaauuacucaucuguauc

SEQ ID NO: 4757 - RNA, 22 nt, Artificial Sequence
  SAMD9 targeting guide sequence portion
accaacaaguaccaaaauuacu

SEQ ID NO: 4758 - RNA, 22 nt, Artificial Sequence
  SAMD9 targeting guide sequence portion
acucaucuguaucaucauccag

SEQ ID NO: 4759 - RNA, 22 nt, Artificial Sequence
  SAMD9 targeting guide sequence portion
agaugaguaauuuugguacuug

SEQ ID NO: 4760 - RNA, 22 nt, Artificial Sequence
  SAMD9 targeting guide sequence portion
agccuggaugaugauacagaug

SEQ ID NO: 4761 - RNA, 22 nt, Artificial Sequence
  SAMD9 targeting guide sequence portion
aguaauuuugguacuuguuggu

SEQ ID NO: 4762 - RNA, 22 nt, Artificial Sequence
  SAMD9 targeting guide sequence portion
aguaccaaaauuacucaucugu

SEQ ID NO: 4763 - RNA, 22 nt, Artificial Sequence
  SAMD9 targeting guide sequence portion
auacagaugaguaauuuuggua

SEQ ID NO: 4764 - RNA, 22 nt, Artificial Sequence
  SAMD9 targeting guide sequence portion
augaguaauuuugguacuuguu

SEQ ID NO: 4765 - RNA, 22 nt, Artificial Sequence
  SAMD9 targeting guide sequence portion
augauacagaugaguaauuuug

SEQ ID NO: 4766 - RNA, 22 nt, Artificial Sequence
  SAMD9 targeting guide sequence portion
augaugauacagaugaguaauu

SEQ ID NO: 4767 - RNA, 22 nt, Artificial Sequence
  SAMD9 targeting guide sequence portion
auuacucaucuguaucaucauc

SEQ ID NO: 4768 - RNA, 22 nt, Artificial Sequence
  SAMD9 targeting guide sequence portion
caaaauuacucaucuguaucau

SEQ ID NO: 4769 - RNA, 22 nt, Artificial Sequence
  SAMD9 targeting guide sequence portion
caacaaguaccaaaauuacuca

SEQ ID NO: 4770 - RNA, 22 nt, Artificial Sequence
  SAMD9 targeting guide sequence portion
caaguaccaaaauuacucaucu

SEQ ID NO: 4771 - RNA, 22 nt, Artificial Sequence
  SAMD9 targeting guide sequence portion
cacagccuggaugaugauacag

SEQ ID NO: 4772 - RNA, 22 nt, Artificial Sequence
  SAMD9 targeting guide sequence portion
cagaugaguaauuuugguacuu

SEQ ID NO: 4773 - RNA, 22 nt, Artificial Sequence
  SAMD9 targeting guide sequence portion
cagccuggaugaugauacagau

SEQ ID NO: 4774 - RNA, 22 nt, Artificial Sequence
  SAMD9 targeting guide sequence portion
ccaaaauuacucaucuguauca

SEQ ID NO: 4775 - RNA, 22 nt, Artificial Sequence
  SAMD9 targeting guide sequence portion
ccaacaaguaccaaaauuacuc

SEQ ID NO: 4776 - RNA, 22 nt, Artificial Sequence
  SAMD9 targeting guide sequence portion
ccacagccuggaugaugauaca

SEQ ID NO: 4777 - RNA, 22 nt, Artificial Sequence
  SAMD9 targeting guide sequence portion
ccuggaugaugauacagaugag

SEQ ID NO: 4778 - RNA, 22 nt, Artificial Sequence
  SAMD9 targeting guide sequence portion
cuaaaccaacaaguaccaaaau

SEQ ID NO: 4779 - RNA, 22 nt, Artificial Sequence
  SAMD9 targeting guide sequence portion
cucaucuguaucaucauccagg

SEQ ID NO: 4780 - RNA, 22 nt, Artificial Sequence
  SAMD9 targeting guide sequence portion
cuggaugaugauacagaugagu

SEQ ID NO: 4781 - RNA, 22 nt, Artificial Sequence
  SAMD9 targeting guide sequence portion
cuucuaaaccaacaaguaccaa

SEQ ID NO: 4782 - RNA, 22 nt, Artificial Sequence
  SAMD9 targeting guide sequence portion
gaguaauuuugguacuuguugg

SEQ ID NO: 4783 - RNA, 22 nt, Artificial Sequence
  SAMD9 targeting guide sequence portion
gauacagaugaguaauuuuggu

SEQ ID NO: 4784 - RNA, 22 nt, Artificial Sequence
  SAMD9 targeting guide sequence portion
gaugaguaauuuugguacuugu

SEQ ID NO: 4785 - RNA, 22 nt, Artificial Sequence
  SAMD9 targeting guide sequence portion
gaugauacagaugaguaauuuu

SEQ ID NO: 4786 - RNA, 22 nt, Artificial Sequence
  SAMD9 targeting guide sequence portion
gaugaugauacagaugaguaau

SEQ ID NO: 4787 - RNA, 22 nt, Artificial Sequence
  SAMD9 targeting guide sequence portion
gccuggaugaugauacagauga

SEQ ID NO: 4788 - RNA, 22 nt, Artificial Sequence
  SAMD9 targeting guide sequence portion
ggaugaugauacagaugaguaa

SEQ ID NO: 4789 - RNA, 22 nt, Artificial Sequence
  SAMD9 targeting guide sequence portion
guaauuuugguacuuguugguu

SEQ ID NO: 4790 - RNA, 22 nt, Artificial Sequence
  SAMD9 targeting guide sequence portion
guaccaaaauuacucaucugua

SEQ ID NO: 4791 - RNA, 22 nt, Artificial Sequence
  SAMD9 targeting guide sequence portion
uaaaccaacaaguaccaaaauu

SEQ ID NO: 4792 - RNA, 22 nt, Artificial Sequence
  SAMD9 targeting guide sequence portion
uacagaugaguaauuuugguac

SEQ ID NO: 4793 - RNA, 22 nt, Artificial Sequence
  SAMD9 targeting guide sequence portion
uaccaaaauuacucaucuguau

SEQ ID NO: 4794 - RNA, 22 nt, Artificial Sequence
  SAMD9 targeting guide sequence portion
uacucaucuguaucaucaucca

SEQ ID NO: 4795 - RNA, 22 nt, Artificial Sequence
  SAMD9 targeting guide sequence portion
ucuaaaccaacaaguaccaaaa

SEQ ID NO: 4796 - RNA, 22 nt, Artificial Sequence
  SAMD9 targeting guide sequence portion
ugaguaauuuugguacuuguug

SEQ ID NO: 4797 - RNA, 22 nt, Artificial Sequence
  SAMD9 targeting guide sequence portion
ugauacagaugaguaauuuugg

SEQ ID NO: 4798 - RNA, 22 nt, Artificial Sequence
  SAMD9 targeting guide sequence portion
ugaugauacagaugaguaauuu

SEQ ID NO: 4799 - RNA, 22 nt, Artificial Sequence
  SAMD9 targeting guide sequence portion
uggaugaugauacagaugagua

SEQ ID NO: 4800 - RNA, 22 nt, Artificial Sequence
  SAMD9 targeting guide sequence portion
uuacucaucuguaucaucaucc

SEQ ID NO: 4801 - RNA, 22 nt, Artificial Sequence
  SAMD9 targeting guide sequence portion
uucuaaaccaacaaguaccaaa

SEQ ID NO: 4802 - RNA, 20 nt, Artificial Sequence
  SAMD9 targeting guide sequence portion
aaaccagcaaguaccaaaau

SEQ ID NO: 4803 - RNA, 20 nt, Artificial Sequence
  SAMD9 targeting guide sequence portion
aaacugugcagauucuucua

SEQ ID NO: 4804 - RNA, 20 nt, Artificial Sequence
  SAMD9 targeting guide sequence portion
aaccagcaaguaccaaaauu

SEQ ID NO: 4805 - RNA, 20 nt, Artificial Sequence
  SAMD9 targeting guide sequence portion
aacugugcagauucuucuaa

SEQ ID NO: 4806 - RNA, 20 nt, Artificial Sequence
  SAMD9 targeting guide sequence portion
aauaauuuugguacuugcug

SEQ ID NO: 4807 - RNA, 20 nt, Artificial Sequence
  SAMD9 targeting guide sequence portion
aauuuugguacuugcugguu

SEQ ID NO: 4808 - RNA, 20 nt, Artificial Sequence
  SAMD9 targeting guide sequence portion
acagaugaauaauuuuggua

SEQ ID NO: 4809 - RNA, 20 nt, Artificial Sequence
  SAMD9 targeting guide sequence portion
accagcaaguaccaaaauua

SEQ ID NO: 4810 - RNA, 20 nt, Artificial Sequence
  SAMD9 targeting guide sequence portion
acugugcagauucuucuaaa

SEQ ID NO: 4811 - RNA, 20 nt, Artificial Sequence
  SAMD9 targeting guide sequence portion
acuugcugguuuagaagaau

SEQ ID NO: 4812 - RNA, 20 nt, Artificial Sequence
  SAMD9 targeting guide sequence portion
agaugaauaauuuugguacu

SEQ ID NO: 4813 - RNA, 20 nt, Artificial Sequence
  SAMD9 targeting guide sequence portion
agauucuucuaaaccagcaa

SEQ ID NO: 4814 - RNA, 20 nt, Artificial Sequence
  SAMD9 targeting guide sequence portion
agcaaguaccaaaauuauuc

SEQ ID NO: 4815 - RNA, 20 nt, Artificial Sequence
  SAMD9 targeting guide sequence portion
auaauuuugguacuugcugg

SEQ ID NO: 4816 - RNA, 20 nt, Artificial Sequence
  SAMD9 targeting guide sequence portion
augaauaauuuugguacuug

SEQ ID NO: 4817 - RNA, 20 nt, Artificial Sequence
  SAMD9 targeting guide sequence portion
auucuucuaaaccagcaagu

SEQ ID NO: 4818 - RNA, 20 nt, Artificial Sequence
  SAMD9 targeting guide sequence portion
auuuugguacuugcugguuu

SEQ ID NO: 4819 - RNA, 20 nt, Artificial Sequence
  SAMD9 targeting guide sequence portion
cagaugaauaauuuugguac

SEQ ID NO: 4820 - RNA, 20 nt, Artificial Sequence
  SAMD9 targeting guide sequence portion
cagauucuucuaaaccagca

SEQ ID NO: 4821 - RNA, 20 nt, Artificial Sequence
  SAMD9 targeting guide sequence portion
cagcaaguaccaaaauuauu

SEQ ID NO: 4822 - RNA, 20 nt, Artificial Sequence
  SAMD9 targeting guide sequence portion
ccagcaaguaccaaaauuau

SEQ ID NO: 4823 - RNA, 20 nt, Artificial Sequence
  SAMD9 targeting guide sequence portion
cuaaaccagcaaguaccaaa

SEQ ID NO: 4824 - RNA, 20 nt, Artificial Sequence
  SAMD9 targeting guide sequence portion
cugguuuagaagaaucugca

SEQ ID NO: 4825 - RNA, 20 nt, Artificial Sequence
  SAMD9 targeting guide sequence portion
cugugcagauucuucuaaac

SEQ ID NO: 4826 - RNA, 20 nt, Artificial Sequence
  SAMD9 targeting guide sequence portion
cuucuaaaccagcaaguacc

SEQ ID NO: 4827 - RNA, 20 nt, Artificial Sequence
  SAMD9 targeting guide sequence portion
cuugcugguuuagaagaauc

SEQ ID NO: 4828 - RNA, 20 nt, Artificial Sequence
  SAMD9 targeting guide sequence portion
gaauaauuuugguacuugcu

SEQ ID NO: 4829 - RNA, 20 nt, Artificial Sequence
  SAMD9 targeting guide sequence portion
gaugaauaauuuugguacuu

SEQ ID NO: 4830 - RNA, 20 nt, Artificial Sequence
  SAMD9 targeting guide sequence portion
gauucuucuaaaccagcaag

SEQ ID NO: 4831 - RNA, 20 nt, Artificial Sequence
  SAMD9 targeting guide sequence portion
gcaaguaccaaaauuauuca

SEQ ID NO: 4832 - RNA, 20 nt, Artificial Sequence
  SAMD9 targeting guide sequence portion
gcagauucuucuaaaccagc

SEQ ID NO: 4833 - RNA, 20 nt, Artificial Sequence
  SAMD9 targeting guide sequence portion
gcugguuuagaagaaucugc

SEQ ID NO: 4834 - RNA, 20 nt, Artificial Sequence
  SAMD9 targeting guide sequence portion
gguacuugcugguuuagaag

SEQ ID NO: 4835 - RNA, 20 nt, Artificial Sequence
  SAMD9 targeting guide sequence portion
guacuugcugguuuagaaga

SEQ ID NO: 4836 - RNA, 20 nt, Artificial Sequence
  SAMD9 targeting guide sequence portion
gugcagauucuucuaaacca

SEQ ID NO: 4837 - RNA, 20 nt, Artificial Sequence
  SAMD9 targeting guide sequence portion
uaaaccagcaaguaccaaaa

SEQ ID NO: 4838 - RNA, 20 nt, Artificial Sequence
  SAMD9 targeting guide sequence portion
uaauuuugguacuugcuggu

SEQ ID NO: 4839 - RNA, 20 nt, Artificial Sequence
  SAMD9 targeting guide sequence portion
uacagaugaauaauuuuggu

SEQ ID NO: 4840 - RNA, 20 nt, Artificial Sequence
  SAMD9 targeting guide sequence portion
uacuugcugguuuagaagaa

SEQ ID NO: 4841 - RNA, 20 nt, Artificial Sequence
  SAMD9 targeting guide sequence portion
ucuaaaccagcaaguaccaa

SEQ ID NO: 4842 - RNA, 20 nt, Artificial Sequence
  SAMD9 targeting guide sequence portion
ucuucuaaaccagcaaguac

SEQ ID NO: 4843 - RNA, 20 nt, Artificial Sequence
  SAMD9 targeting guide sequence portion
ugaauaauuuugguacuugc

SEQ ID NO: 4844 - RNA, 20 nt, Artificial Sequence
  SAMD9 targeting guide sequence portion
ugcagauucuucuaaaccag

SEQ ID NO: 4845 - RNA, 20 nt, Artificial Sequence
  SAMD9 targeting guide sequence portion
ugcugguuuagaagaaucug

SEQ ID NO: 4846 - RNA, 20 nt, Artificial Sequence
  SAMD9 targeting guide sequence portion
ugguacuugcugguuuagaa

SEQ ID NO: 4847 - RNA, 20 nt, Artificial Sequence
  SAMD9 targeting guide sequence portion
ugugcagauucuucuaaacc

SEQ ID NO: 4848 - RNA, 20 nt, Artificial Sequence
  SAMD9 targeting guide sequence portion
uucuaaaccagcaaguacca

SEQ ID NO: 4849 - RNA, 20 nt, Artificial Sequence
  SAMD9 targeting guide sequence portion
uucuucuaaaccagcaagua

SEQ ID NO: 4850 - RNA, 20 nt, Artificial Sequence
  SAMD9 targeting guide sequence portion
uugcugguuuagaagaaucu

SEQ ID NO: 4851 - RNA, 20 nt, Artificial Sequence
  SAMD9 targeting guide sequence portion
uugguacuugcugguuuaga

SEQ ID NO: 4852 - RNA, 20 nt, Artificial Sequence
  SAMD9 targeting guide sequence portion
uuugguacuugcugguuuag

SEQ ID NO: 4853 - RNA, 20 nt, Artificial Sequence
  SAMD9 targeting guide sequence portion
uuuugguacuugcugguuua

SEQ ID NO: 4854 - RNA, 21 nt, Artificial Sequence
  SAMD9 targeting guide sequence portion
aaaacugugcagauucuucua

SEQ ID NO: 4855 - RNA, 21 nt, Artificial Sequence
  SAMD9 targeting guide sequence portion
aaaccagcaaguaccaaaauu

SEQ ID NO: 4856 - RNA, 21 nt, Artificial Sequence
  SAMD9 targeting guide sequence portion
aaacugugcagauucuucuaa

SEQ ID NO: 4857 - RNA, 21 nt, Artificial Sequence
  SAMD9 targeting guide sequence portion
aaccagcaaguaccaaaauua

SEQ ID NO: 4858 - RNA, 21 nt, Artificial Sequence
  SAMD9 targeting guide sequence portion
aacugugcagauucuucuaaa

SEQ ID NO: 4859 - RNA, 21 nt, Artificial Sequence
  SAMD9 targeting guide sequence portion
aauaauuuugguacuugcugg

SEQ ID NO: 4860 - RNA, 21 nt, Artificial Sequence
  SAMD9 targeting guide sequence portion
aauuuugguacuugcugguuu

SEQ ID NO: 4861 - RNA, 21 nt, Artificial Sequence
  SAMD9 targeting guide sequence portion
acagaugaauaauuuugguac

SEQ ID NO: 4862 - RNA, 21 nt, Artificial Sequence
  SAMD9 targeting guide sequence portion
accagcaaguaccaaaauuau

SEQ ID NO: 4863 - RNA, 21 nt, Artificial Sequence
  SAMD9 targeting guide sequence portion
acugugcagauucuucuaaac

SEQ ID NO: 4864 - RNA, 21 nt, Artificial Sequence
  SAMD9 targeting guide sequence portion
acuugcugguuuagaagaauc

SEQ ID NO: 4865 - RNA, 21 nt, Artificial Sequence
  SAMD9 targeting guide sequence portion
agaugaauaauuuugguacuu

SEQ ID NO: 4866 - RNA, 21 nt, Artificial Sequence
  SAMD9 targeting guide sequence portion
agauucuucuaaaccagcaag

SEQ ID NO: 4867 - RNA, 21 nt, Artificial Sequence
  SAMD9 targeting guide sequence portion
agcaaguaccaaaauuauuca

SEQ ID NO: 4868 - RNA, 21 nt, Artificial Sequence
  SAMD9 targeting guide sequence portion
auaauuuugguacuugcuggu

SEQ ID NO: 4869 - RNA, 21 nt, Artificial Sequence
  SAMD9 targeting guide sequence portion
auacagaugaauaauuuuggu

SEQ ID NO: 4870 - RNA, 21 nt, Artificial Sequence
  SAMD9 targeting guide sequence portion
augaauaauuuugguacuugc

SEQ ID NO: 4871 - RNA, 21 nt, Artificial Sequence
  SAMD9 targeting guide sequence portion
auucuucuaaaccagcaagua

SEQ ID NO: 4872 - RNA, 21 nt, Artificial Sequence
  SAMD9 targeting guide sequence portion
auuuugguacuugcugguuua

SEQ ID NO: 4873 - RNA, 21 nt, Artificial Sequence
  SAMD9 targeting guide sequence portion
cagaugaauaauuuugguacu

SEQ ID NO: 4874 - RNA, 21 nt, Artificial Sequence
  SAMD9 targeting guide sequence portion
cagauucuucuaaaccagcaa

SEQ ID NO: 4875 - RNA, 21 nt, Artificial Sequence
  SAMD9 targeting guide sequence portion
cagcaaguaccaaaauuauuc

SEQ ID NO: 4876 - RNA, 21 nt, Artificial Sequence
  SAMD9 targeting guide sequence portion
ccagcaaguaccaaaauuauu

SEQ ID NO: 4877 - RNA, 21 nt, Artificial Sequence
  SAMD9 targeting guide sequence portion
cuaaaccagcaaguaccaaaa

SEQ ID NO: 4878 - RNA, 21 nt, Artificial Sequence
  SAMD9 targeting guide sequence portion
cugguuuagaagaaucugcac

SEQ ID NO: 4879 - RNA, 21 nt, Artificial Sequence
  SAMD9 targeting guide sequence portion
cugugcagauucuucuaaacc

SEQ ID NO: 4880 - RNA, 21 nt, Artificial Sequence
  SAMD9 targeting guide sequence portion
cuucuaaaccagcaaguacca

SEQ ID NO: 4881 - RNA, 21 nt, Artificial Sequence
  SAMD9 targeting guide sequence portion
cuugcugguuuagaagaaucu

SEQ ID NO: 4882 - RNA, 21 nt, Artificial Sequence
  SAMD9 targeting guide sequence portion
gaauaauuuugguacuugcug

SEQ ID NO: 4883 - RNA, 21 nt, Artificial Sequence
  SAMD9 targeting guide sequence portion
gaugaauaauuuugguacuug

SEQ ID NO: 4884 - RNA, 21 nt, Artificial Sequence
  SAMD9 targeting guide sequence portion
gauucuucuaaaccagcaagu

SEQ ID NO: 4885 - RNA, 21 nt, Artificial Sequence
  SAMD9 targeting guide sequence portion
gcaaguaccaaaauuauucau

SEQ ID NO: 4886 - RNA, 21 nt, Artificial Sequence
  SAMD9 targeting guide sequence portion
gcagauucuucuaaaccagca

SEQ ID NO: 4887 - RNA, 21 nt, Artificial Sequence
  SAMD9 targeting guide sequence portion
gcugguuuagaagaaucugca

SEQ ID NO: 4888 - RNA, 21 nt, Artificial Sequence
  SAMD9 targeting guide sequence portion
gguacuugcugguuuagaaga

SEQ ID NO: 4889 - RNA, 21 nt, Artificial Sequence
  SAMD9 targeting guide sequence portion
guacuugcugguuuagaagaa

SEQ ID NO: 4890 - RNA, 21 nt, Artificial Sequence
  SAMD9 targeting guide sequence portion
gugcagauucuucuaaaccag

SEQ ID NO: 4891 - RNA, 21 nt, Artificial Sequence
  SAMD9 targeting guide sequence portion
uaaaccagcaaguaccaaaau

SEQ ID NO: 4892 - RNA, 21 nt, Artificial Sequence
  SAMD9 targeting guide sequence portion
uaauuuugguacuugcugguu

SEQ ID NO: 4893 - RNA, 21 nt, Artificial Sequence
  SAMD9 targeting guide sequence portion
uacagaugaauaauuuuggua

SEQ ID NO: 4894 - RNA, 21 nt, Artificial Sequence
  SAMD9 targeting guide sequence portion
uacuugcugguuuagaagaau

SEQ ID NO: 4895 - RNA, 21 nt, Artificial Sequence
  SAMD9 targeting guide sequence portion
ucuaaaccagcaaguaccaaa

SEQ ID NO: 4896 - RNA, 21 nt, Artificial Sequence
  SAMD9 targeting guide sequence portion
ucuucuaaaccagcaaguacc

SEQ ID NO: 4897 - RNA, 21 nt, Artificial Sequence
  SAMD9 targeting guide sequence portion
ugaauaauuuugguacuugcu

SEQ ID NO: 4898 - RNA, 21 nt, Artificial Sequence
  SAMD9 targeting guide sequence portion
ugcagauucuucuaaaccagc

SEQ ID NO: 4899 - RNA, 21 nt, Artificial Sequence
  SAMD9 targeting guide sequence portion
ugcugguuuagaagaaucugc

SEQ ID NO: 4900 - RNA, 21 nt, Artificial Sequence
  SAMD9 targeting guide sequence portion
ugguacuugcugguuuagaag

SEQ ID NO: 4901 - RNA, 21 nt, Artificial Sequence
  SAMD9 targeting guide sequence portion
ugugcagauucuucuaaacca

SEQ ID NO: 4902 - RNA, 21 nt, Artificial Sequence
  SAMD9 targeting guide sequence portion
uucuaaaccagcaaguaccaa

SEQ ID NO: 4903 - RNA, 21 nt, Artificial Sequence
  SAMD9 targeting guide sequence portion
uucuucuaaaccagcaaguac

SEQ ID NO: 4904 - RNA, 21 nt, Artificial Sequence
  SAMD9 targeting guide sequence portion
uugcugguuuagaagaaucug

SEQ ID NO: 4905 - RNA, 21 nt, Artificial Sequence
  SAMD9 targeting guide sequence portion
uugguacuugcugguuuagaa

SEQ ID NO: 4906 - RNA, 21 nt, Artificial Sequence
  SAMD9 targeting guide sequence portion
uuugguacuugcugguuuaga

SEQ ID NO: 4907 - RNA, 21 nt, Artificial Sequence
  SAMD9 targeting guide sequence portion
uuuugguacuugcugguuuag

SEQ ID NO: 4908 - RNA, 22 nt, Artificial Sequence
  SAMD9 targeting guide sequence portion
aaaacugugcagauucuucuaa

SEQ ID NO: 4909 - RNA, 22 nt, Artificial Sequence
  SAMD9 targeting guide sequence portion
aaaccagcaaguaccaaaauua

SEQ ID NO: 4910 - RNA, 22 nt, Artificial Sequence
  SAMD9 targeting guide sequence portion
aaacugugcagauucuucuaaa

SEQ ID NO: 4911 - RNA, 22 nt, Artificial Sequence
  SAMD9 targeting guide sequence portion
aaccagcaaguaccaaaauuau

SEQ ID NO: 4912 - RNA, 22 nt, Artificial Sequence
  SAMD9 targeting guide sequence portion
aacugugcagauucuucuaaac

SEQ ID NO: 4913 - RNA, 22 nt, Artificial Sequence
  SAMD9 targeting guide sequence portion
aauaauuuugguacuugcuggu

SEQ ID NO: 4914 - RNA, 22 nt, Artificial Sequence
  SAMD9 targeting guide sequence portion
aauuuugguacuugcugguuua

SEQ ID NO: 4915 - RNA, 22 nt, Artificial Sequence
  SAMD9 targeting guide sequence portion
acagaugaauaauuuugguacu

SEQ ID NO: 4916 - RNA, 22 nt, Artificial Sequence
  SAMD9 targeting guide sequence portion
accagcaaguaccaaaauuauu

SEQ ID NO: 4917 - RNA, 22 nt, Artificial Sequence
  SAMD9 targeting guide sequence portion
acugugcagauucuucuaaacc

SEQ ID NO: 4918 - RNA, 22 nt, Artificial Sequence
  SAMD9 targeting guide sequence portion
acuugcugguuuagaagaaucu

SEQ ID NO: 4919 - RNA, 22 nt, Artificial Sequence
  SAMD9 targeting guide sequence portion
agaugaauaauuuugguacuug

SEQ ID NO: 4920 - RNA, 22 nt, Artificial Sequence
  SAMD9 targeting guide sequence portion
agauucuucuaaaccagcaagu

SEQ ID NO: 4921 - RNA, 22 nt, Artificial Sequence
  SAMD9 targeting guide sequence portion
agcaaguaccaaaauuauucau

SEQ ID NO: 4922 - RNA, 22 nt, Artificial Sequence
  SAMD9 targeting guide sequence portion
auaauuuugguacuugcugguu

SEQ ID NO: 4923 - RNA, 22 nt, Artificial Sequence
  SAMD9 targeting guide sequence portion
auacagaugaauaauuuuggua

SEQ ID NO: 4924 - RNA, 22 nt, Artificial Sequence
  SAMD9 targeting guide sequence portion
augaauaauuuugguacuugcu

SEQ ID NO: 4925 - RNA, 22 nt, Artificial Sequence
  SAMD9 targeting guide sequence portion
auucuucuaaaccagcaaguac

SEQ ID NO: 4926 - RNA, 22 nt, Artificial Sequence
  SAMD9 targeting guide sequence portion
auuuugguacuugcugguuuag

SEQ ID NO: 4927 - RNA, 22 nt, Artificial Sequence
  SAMD9 targeting guide sequence portion
caaaacugugcagauucuucua

SEQ ID NO: 4928 - RNA, 22 nt, Artificial Sequence
  SAMD9 targeting guide sequence portion
cagaugaauaauuuugguacuu

SEQ ID NO: 4929 - RNA, 22 nt, Artificial Sequence
  SAMD9 targeting guide sequence portion
cagauucuucuaaaccagcaag

SEQ ID NO: 4930 - RNA, 22 nt, Artificial Sequence
  SAMD9 targeting guide sequence portion
cagcaaguaccaaaauuauuca

SEQ ID NO: 4931 - RNA, 22 nt, Artificial Sequence
  SAMD9 targeting guide sequence portion
ccagcaaguaccaaaauuauuc

SEQ ID NO: 4932 - RNA, 22 nt, Artificial Sequence
  SAMD9 targeting guide sequence portion
cuaaaccagcaaguaccaaaau

SEQ ID NO: 4933 - RNA, 22 nt, Artificial Sequence
  SAMD9 targeting guide sequence portion
cugguuuagaagaaucugcaca

SEQ ID NO: 4934 - RNA, 22 nt, Artificial Sequence
  SAMD9 targeting guide sequence portion
cugugcagauucuucuaaacca

SEQ ID NO: 4935 - RNA, 22 nt, Artificial Sequence
  SAMD9 targeting guide sequence portion
cuucuaaaccagcaaguaccaa

SEQ ID NO: 4936 - RNA, 22 nt, Artificial Sequence
  SAMD9 targeting guide sequence portion
cuugcugguuuagaagaaucug

SEQ ID NO: 4937 - RNA, 22 nt, Artificial Sequence
  SAMD9 targeting guide sequence portion
gaauaauuuugguacuugcugg

SEQ ID NO: 4938 - RNA, 22 nt, Artificial Sequence
  SAMD9 targeting guide sequence portion
gauacagaugaauaauuuuggu

SEQ ID NO: 4939 - RNA, 22 nt, Artificial Sequence
  SAMD9 targeting guide sequence portion
gaugaauaauuuugguacuugc

SEQ ID NO: 4940 - RNA, 22 nt, Artificial Sequence
  SAMD9 targeting guide sequence portion
gauucuucuaaaccagcaagua

SEQ ID NO: 4941 - RNA, 22 nt, Artificial Sequence
  SAMD9 targeting guide sequence portion
gcaaguaccaaaauuauucauc

SEQ ID NO: 4942 - RNA, 22 nt, Artificial Sequence
  SAMD9 targeting guide sequence portion
gcagauucuucuaaaccagcaa

SEQ ID NO: 4943 - RNA, 22 nt, Artificial Sequence
  SAMD9 targeting guide sequence portion
gcugguuuagaagaaucugcac

SEQ ID NO: 4944 - RNA, 22 nt, Artificial Sequence
  SAMD9 targeting guide sequence portion
gguacuugcugguuuagaagaa

SEQ ID NO: 4945 - RNA, 22 nt, Artificial Sequence
  SAMD9 targeting guide sequence portion
guacuugcugguuuagaagaau

SEQ ID NO: 4946 - RNA, 22 nt, Artificial Sequence
  SAMD9 targeting guide sequence portion
gugcagauucuucuaaaccagc

SEQ ID NO: 4947 - RNA, 22 nt, Artificial Sequence
  SAMD9 targeting guide sequence portion
uaaaccagcaaguaccaaaauu

SEQ ID NO: 4948 - RNA, 22 nt, Artificial Sequence
  SAMD9 targeting guide sequence portion
uaauuuugguacuugcugguuu

SEQ ID NO: 4949 - RNA, 22 nt, Artificial Sequence
  SAMD9 targeting guide sequence portion
uacagaugaauaauuuugguac

SEQ ID NO: 4950 - RNA, 22 nt, Artificial Sequence
  SAMD9 targeting guide sequence portion
uacuugcugguuuagaagaauc

SEQ ID NO: 4951 - RNA, 22 nt, Artificial Sequence
  SAMD9 targeting guide sequence portion
ucuaaaccagcaaguaccaaaa

SEQ ID NO: 4952 - RNA, 22 nt, Artificial Sequence
  SAMD9 targeting guide sequence portion
ucuucuaaaccagcaaguacca

SEQ ID NO: 4953 - RNA, 22 nt, Artificial Sequence
  SAMD9 targeting guide sequence portion
ugaauaauuuugguacuugcug

SEQ ID NO: 4954 - RNA, 22 nt, Artificial Sequence
  SAMD9 targeting guide sequence portion
ugcagauucuucuaaaccagca

SEQ ID NO: 4955 - RNA, 22 nt, Artificial Sequence
  SAMD9 targeting guide sequence portion
ugcugguuuagaagaaucugca

SEQ ID NO: 4956 - RNA, 22 nt, Artificial Sequence
  SAMD9 targeting guide sequence portion
ugguacuugcugguuuagaaga

SEQ ID NO: 4957 - RNA, 22 nt, Artificial Sequence
  SAMD9 targeting guide sequence portion
ugugcagauucuucuaaaccag

SEQ ID NO: 4958 - RNA, 22 nt, Artificial Sequence
  SAMD9 targeting guide sequence portion
uucuaaaccagcaaguaccaaa

SEQ ID NO: 4959 - RNA, 22 nt, Artificial Sequence
  SAMD9 targeting guide sequence portion
uucuucuaaaccagcaaguacc

SEQ ID NO: 4960 - RNA, 22 nt, Artificial Sequence
  SAMD9 targeting guide sequence portion
uugcugguuuagaagaaucugc

SEQ ID NO: 4961 - RNA, 22 nt, Artificial Sequence
  SAMD9 targeting guide sequence portion
uugguacuugcugguuuagaag

SEQ ID NO: 4962 - RNA, 22 nt, Artificial Sequence
  SAMD9 targeting guide sequence portion
uuugguacuugcugguuuagaa

SEQ ID NO: 4963 - RNA, 22 nt, Artificial Sequence
  SAMD9 targeting guide sequence portion
uuuugguacuugcugguuuaga

SEQ ID NO: 4964 - RNA, 20 nt, Artificial Sequence
  SAMD9 targeting guide sequence portion
aaaacugugaagauucuucu

SEQ ID NO: 4965 - RNA, 20 nt, Artificial Sequence
  SAMD9 targeting guide sequence portion
aaacugugaagauucuucua

SEQ ID NO: 4966 - RNA, 20 nt, Artificial Sequence
  SAMD9 targeting guide sequence portion
aacugugaagauucuucuaa

SEQ ID NO: 4967 - RNA, 20 nt, Artificial Sequence
  SAMD9 targeting guide sequence portion
aagaaucuucacaguuuuga

SEQ ID NO: 4968 - RNA, 20 nt, Artificial Sequence
  SAMD9 targeting guide sequence portion
aagauucuucuaaaccaaca

SEQ ID NO: 4969 - RNA, 20 nt, Artificial Sequence
  SAMD9 targeting guide sequence portion
aagcaaugauucaaaacugu

SEQ ID NO: 4970 - RNA, 20 nt, Artificial Sequence
  SAMD9 targeting guide sequence portion
aaucuucacaguuuugaauc

SEQ ID NO: 4971 - RNA, 20 nt, Artificial Sequence
  SAMD9 targeting guide sequence portion
aaugauucaaaacugugaag

SEQ ID NO: 4972 - RNA, 20 nt, Artificial Sequence
  SAMD9 targeting guide sequence portion
acugugaagauucuucuaaa

SEQ ID NO: 4973 - RNA, 20 nt, Artificial Sequence
  SAMD9 targeting guide sequence portion
acuuguugguuuagaagaau

SEQ ID NO: 4974 - RNA, 20 nt, Artificial Sequence
  SAMD9 targeting guide sequence portion
agaagaaucuucacaguuuu

SEQ ID NO: 4975 - RNA, 20 nt, Artificial Sequence
  SAMD9 targeting guide sequence portion
agaaucuucacaguuuugaa

SEQ ID NO: 4976 - RNA, 20 nt, Artificial Sequence
  SAMD9 targeting guide sequence portion
agcaaugauucaaaacugug

SEQ ID NO: 4977 - RNA, 20 nt, Artificial Sequence
  SAMD9 targeting guide sequence portion
aucuucacaguuuugaauca

SEQ ID NO: 4978 - RNA, 20 nt, Artificial Sequence
  SAMD9 targeting guide sequence portion
augauucaaaacugugaaga

SEQ ID NO: 4979 - RNA, 20 nt, Artificial Sequence
  SAMD9 targeting guide sequence portion
auucaaaacugugaagauuc

SEQ ID NO: 4980 - RNA, 20 nt, Artificial Sequence
  SAMD9 targeting guide sequence portion
caaaacugugaagauucuuc

SEQ ID NO: 4981 - RNA, 20 nt, Artificial Sequence
  SAMD9 targeting guide sequence portion
caaugauucaaaacugugaa

SEQ ID NO: 4982 - RNA, 20 nt, Artificial Sequence
  SAMD9 targeting guide sequence portion
cugugaagauucuucuaaac

SEQ ID NO: 4983 - RNA, 20 nt, Artificial Sequence
  SAMD9 targeting guide sequence portion
cuucacaguuuugaaucauu

SEQ ID NO: 4984 - RNA, 20 nt, Artificial Sequence
  SAMD9 targeting guide sequence portion
cuugaagcaaugauucaaaa

SEQ ID NO: 4985 - RNA, 20 nt, Artificial Sequence
  SAMD9 targeting guide sequence portion
cuuguugguuuagaagaauc

SEQ ID NO: 4986 - RNA, 20 nt, Artificial Sequence
  SAMD9 targeting guide sequence portion
gaagaaucuucacaguuuug

SEQ ID NO: 4987 - RNA, 20 nt, Artificial Sequence
  SAMD9 targeting guide sequence portion
gaagauucuucuaaaccaac

SEQ ID NO: 4988 - RNA, 20 nt, Artificial Sequence
  SAMD9 targeting guide sequence portion
gaagcaaugauucaaaacug

SEQ ID NO: 4989 - RNA, 20 nt, Artificial Sequence
  SAMD9 targeting guide sequence portion
gaaucuucacaguuuugaau

SEQ ID NO: 4990 - RNA, 20 nt, Artificial Sequence
  SAMD9 targeting guide sequence portion
gauucaaaacugugaagauu

SEQ ID NO: 4991 - RNA, 20 nt, Artificial Sequence
  SAMD9 targeting guide sequence portion
gcaaugauucaaaacuguga

SEQ ID NO: 4992 - RNA, 20 nt, Artificial Sequence
  SAMD9 targeting guide sequence portion
gguacuuguugguuuagaag

SEQ ID NO: 4993 - RNA, 20 nt, Artificial Sequence
  SAMD9 targeting guide sequence portion
gguuuagaagaaucuucaca

SEQ ID NO: 4994 - RNA, 20 nt, Artificial Sequence
  SAMD9 targeting guide sequence portion
guacuuguugguuuagaaga

SEQ ID NO: 4995 - RNA, 20 nt, Artificial Sequence
  SAMD9 targeting guide sequence portion
gugaagauucuucuaaacca

SEQ ID NO: 4996 - RNA, 20 nt, Artificial Sequence
  SAMD9 targeting guide sequence portion
guugguuuagaagaaucuuc

SEQ ID NO: 4997 - RNA, 20 nt, Artificial Sequence
  SAMD9 targeting guide sequence portion
guuuagaagaaucuucacag

SEQ ID NO: 4998 - RNA, 20 nt, Artificial Sequence
  SAMD9 targeting guide sequence portion
uacuuguugguuuagaagaa

SEQ ID NO: 4999 - RNA, 20 nt, Artificial Sequence
  SAMD9 targeting guide sequence portion
uagaagaaucuucacaguuu

SEQ ID NO: 5000 - RNA, 20 nt, Artificial Sequence
  SAMD9 targeting guide sequence portion
ucaaaacugugaagauucuu

SEQ ID NO: 5001 - RNA, 20 nt, Artificial Sequence
  SAMD9 targeting guide sequence portion
ucacaguuuugaaucauugc

SEQ ID NO: 5002 - RNA, 20 nt, Artificial Sequence
  SAMD9 targeting guide sequence portion
ucuucacaguuuugaaucau

SEQ ID NO: 5003 - RNA, 20 nt, Artificial Sequence
  SAMD9 targeting guide sequence portion
ugaagauucuucuaaaccaa

SEQ ID NO: 5004 - RNA, 20 nt, Artificial Sequence
  SAMD9 targeting guide sequence portion
ugaagcaaugauucaaaacu

SEQ ID NO: 5005 - RNA, 20 nt, Artificial Sequence
  SAMD9 targeting guide sequence portion
ugauucaaaacugugaagau

SEQ ID NO: 5006 - RNA, 20 nt, Artificial Sequence
  SAMD9 targeting guide sequence portion
ugguuuagaagaaucuucac

SEQ ID NO: 5007 - RNA, 20 nt, Artificial Sequence
  SAMD9 targeting guide sequence portion
ugugaagauucuucuaaacc

SEQ ID NO: 5008 - RNA, 20 nt, Artificial Sequence
  SAMD9 targeting guide sequence portion
uguugguuuagaagaaucuu

SEQ ID NO: 5009 - RNA, 20 nt, Artificial Sequence
  SAMD9 targeting guide sequence portion
uuagaagaaucuucacaguu

SEQ ID NO: 5010 - RNA, 20 nt, Artificial Sequence
  SAMD9 targeting guide sequence portion
uucaaaacugugaagauucu

SEQ ID NO: 5011 - RNA, 20 nt, Artificial Sequence
  SAMD9 targeting guide sequence portion
uucacaguuuugaaucauug

SEQ ID NO: 5012 - RNA, 20 nt, Artificial Sequence
  SAMD9 targeting guide sequence portion
uugaagcaaugauucaaaac

SEQ ID NO: 5013 - RNA, 20 nt, Artificial Sequence
  SAMD9 targeting guide sequence portion
uugguuuagaagaaucuuca

SEQ ID NO: 5014 - RNA, 20 nt, Artificial Sequence
  SAMD9 targeting guide sequence portion
uuguugguuuagaagaaucu

SEQ ID NO: 5015 - RNA, 20 nt, Artificial Sequence
  SAMD9 targeting guide sequence portion
uuuagaagaaucuucacagu

SEQ ID NO: 5016 - RNA, 21 nt, Artificial Sequence
  SAMD9 targeting guide sequence portion
aaaacugugaagauucuucua

SEQ ID NO: 5017 - RNA, 21 nt, Artificial Sequence
  SAMD9 targeting guide sequence portion
aaacugugaagauucuucuaa

SEQ ID NO: 5018 - RNA, 21 nt, Artificial Sequence
  SAMD9 targeting guide sequence portion
aacugugaagauucuucuaaa

SEQ ID NO: 5019 - RNA, 21 nt, Artificial Sequence
  SAMD9 targeting guide sequence portion
aagaaucuucacaguuuugaa

SEQ ID NO: 5020 - RNA, 21 nt, Artificial Sequence
  SAMD9 targeting guide sequence portion
aagauucuucuaaaccaacaa

SEQ ID NO: 5021 - RNA, 21 nt, Artificial Sequence
  SAMD9 targeting guide sequence portion
aagcaaugauucaaaacugug

SEQ ID NO: 5022 - RNA, 21 nt, Artificial Sequence
  SAMD9 targeting guide sequence portion
aaucuucacaguuuugaauca

SEQ ID NO: 5023 - RNA, 21 nt, Artificial Sequence
  SAMD9 targeting guide sequence portion
aaugauucaaaacugugaaga

SEQ ID NO: 5024 - RNA, 21 nt, Artificial Sequence
  SAMD9 targeting guide sequence portion
acugugaagauucuucuaaac

SEQ ID NO: 5025 - RNA, 21 nt, Artificial Sequence
  SAMD9 targeting guide sequence portion
acuugaagcaaugauucaaaa

SEQ ID NO: 5026 - RNA, 21 nt, Artificial Sequence
  SAMD9 targeting guide sequence portion
acuuguugguuuagaagaauc

SEQ ID NO: 5027 - RNA, 21 nt, Artificial Sequence
  SAMD9 targeting guide sequence portion
agaagaaucuucacaguuuug

SEQ ID NO: 5028 - RNA, 21 nt, Artificial Sequence
  SAMD9 targeting guide sequence portion
agaaucuucacaguuuugaau

SEQ ID NO: 5029 - RNA, 21 nt, Artificial Sequence
  SAMD9 targeting guide sequence portion
agcaaugauucaaaacuguga

SEQ ID NO: 5030 - RNA, 21 nt, Artificial Sequence
  SAMD9 targeting guide sequence portion
aucuucacaguuuugaaucau

SEQ ID NO: 5031 - RNA, 21 nt, Artificial Sequence
  SAMD9 targeting guide sequence portion
augauucaaaacugugaagau

SEQ ID NO: 5032 - RNA, 21 nt, Artificial Sequence
  SAMD9 targeting guide sequence portion
auucaaaacugugaagauucu

SEQ ID NO: 5033 - RNA, 21 nt, Artificial Sequence
  SAMD9 targeting guide sequence portion
caaaacugugaagauucuucu

SEQ ID NO: 5034 - RNA, 21 nt, Artificial Sequence
  SAMD9 targeting guide sequence portion
caaugauucaaaacugugaag

SEQ ID NO: 5035 - RNA, 21 nt, Artificial Sequence
  SAMD9 targeting guide sequence portion
cugugaagauucuucuaaacc

SEQ ID NO: 5036 - RNA, 21 nt, Artificial Sequence
  SAMD9 targeting guide sequence portion
cuucacaguuuugaaucauug

SEQ ID NO: 5037 - RNA, 21 nt, Artificial Sequence
  SAMD9 targeting guide sequence portion
cuugaagcaaugauucaaaac

SEQ ID NO: 5038 - RNA, 21 nt, Artificial Sequence
  SAMD9 targeting guide sequence portion
cuuguugguuuagaagaaucu

SEQ ID NO: 5039 - RNA, 21 nt, Artificial Sequence
  SAMD9 targeting guide sequence portion
gaagaaucuucacaguuuuga

SEQ ID NO: 5040 - RNA, 21 nt, Artificial Sequence
  SAMD9 targeting guide sequence portion
gaagauucuucuaaaccaaca

SEQ ID NO: 5041 - RNA, 21 nt, Artificial Sequence
  SAMD9 targeting guide sequence portion
gaagcaaugauucaaaacugu

SEQ ID NO: 5042 - RNA, 21 nt, Artificial Sequence
  SAMD9 targeting guide sequence portion
gaaucuucacaguuuugaauc

SEQ ID NO: 5043 - RNA, 21 nt, Artificial Sequence
  SAMD9 targeting guide sequence portion
gauucaaaacugugaagauuc

SEQ ID NO: 5044 - RNA, 21 nt, Artificial Sequence
  SAMD9 targeting guide sequence portion
gcaaugauucaaaacugugaa

SEQ ID NO: 5045 - RNA, 21 nt, Artificial Sequence
  SAMD9 targeting guide sequence portion
gguacuuguugguuuagaaga

SEQ ID NO: 5046 - RNA, 21 nt, Artificial Sequence
  SAMD9 targeting guide sequence portion
gguuuagaagaaucuucacag

SEQ ID NO: 5047 - RNA, 21 nt, Artificial Sequence
  SAMD9 targeting guide sequence portion
guacuuguugguuuagaagaa

SEQ ID NO: 5048 - RNA, 21 nt, Artificial Sequence
  SAMD9 targeting guide sequence portion
gugaagauucuucuaaaccaa

SEQ ID NO: 5049 - RNA, 21 nt, Artificial Sequence
  SAMD9 targeting guide sequence portion
guugguuuagaagaaucuuca

SEQ ID NO: 5050 - RNA, 21 nt, Artificial Sequence
  SAMD9 targeting guide sequence portion
guuuagaagaaucuucacagu

SEQ ID NO: 5051 - RNA, 21 nt, Artificial Sequence
  SAMD9 targeting guide sequence portion
uacuuguugguuuagaagaau

SEQ ID NO: 5052 - RNA, 21 nt, Artificial Sequence
  SAMD9 targeting guide sequence portion
uagaagaaucuucacaguuuu

SEQ ID NO: 5053 - RNA, 21 nt, Artificial Sequence
  SAMD9 targeting guide sequence portion
ucaaaacugugaagauucuuc

SEQ ID NO: 5054 - RNA, 21 nt, Artificial Sequence
  SAMD9 targeting guide sequence portion
ucacaguuuugaaucauugcu

SEQ ID NO: 5055 - RNA, 21 nt, Artificial Sequence
  SAMD9 targeting guide sequence portion
ucuucacaguuuugaaucauu

SEQ ID NO: 5056 - RNA, 21 nt, Artificial Sequence
  SAMD9 targeting guide sequence portion
ugaagauucuucuaaaccaac

SEQ ID NO: 5057 - RNA, 21 nt, Artificial Sequence
  SAMD9 targeting guide sequence portion
ugaagcaaugauucaaaacug

SEQ ID NO: 5058 - RNA, 21 nt, Artificial Sequence
  SAMD9 targeting guide sequence portion
ugauucaaaacugugaagauu

SEQ ID NO: 5059 - RNA, 21 nt, Artificial Sequence
  SAMD9 targeting guide sequence portion
ugguacuuguugguuuagaag

SEQ ID NO: 5060 - RNA, 21 nt, Artificial Sequence
  SAMD9 targeting guide sequence portion
ugguuuagaagaaucuucaca

SEQ ID NO: 5061 - RNA, 21 nt, Artificial Sequence
  SAMD9 targeting guide sequence portion
ugugaagauucuucuaaacca

SEQ ID NO: 5062 - RNA, 21 nt, Artificial Sequence
  SAMD9 targeting guide sequence portion
uguugguuuagaagaaucuuc

SEQ ID NO: 5063 - RNA, 21 nt, Artificial Sequence
  SAMD9 targeting guide sequence portion
uuagaagaaucuucacaguuu

SEQ ID NO: 5064 - RNA, 21 nt, Artificial Sequence
  SAMD9 targeting guide sequence portion
uucaaaacugugaagauucuu

SEQ ID NO: 5065 - RNA, 21 nt, Artificial Sequence
  SAMD9 targeting guide sequence portion
uucacaguuuugaaucauugc

SEQ ID NO: 5066 - RNA, 21 nt, Artificial Sequence
  SAMD9 targeting guide sequence portion
uugaagcaaugauucaaaacu

SEQ ID NO: 5067 - RNA, 21 nt, Artificial Sequence
  SAMD9 targeting guide sequence portion
uugguuuagaagaaucuucac

SEQ ID NO: 5068 - RNA, 21 nt, Artificial Sequence
  SAMD9 targeting guide sequence portion
uuguugguuuagaagaaucuu

SEQ ID NO: 5069 - RNA, 21 nt, Artificial Sequence
  SAMD9 targeting guide sequence portion
uuuagaagaaucuucacaguu

SEQ ID NO: 5070 - RNA, 22 nt, Artificial Sequence
  SAMD9 targeting guide sequence portion
aaaacugugaagauucuucuaa

SEQ ID NO: 5071 - RNA, 22 nt, Artificial Sequence
  SAMD9 targeting guide sequence portion
aaacugugaagauucuucuaaa

SEQ ID NO: 5072 - RNA, 22 nt, Artificial Sequence
  SAMD9 targeting guide sequence portion
aacugugaagauucuucuaaac

SEQ ID NO: 5073 - RNA, 22 nt, Artificial Sequence
  SAMD9 targeting guide sequence portion
aagaaucuucacaguuuugaau

SEQ ID NO: 5074 - RNA, 22 nt, Artificial Sequence
  SAMD9 targeting guide sequence portion
aagauucuucuaaaccaacaag

SEQ ID NO: 5075 - RNA, 22 nt, Artificial Sequence
  SAMD9 targeting guide sequence portion
aagcaaugauucaaaacuguga

SEQ ID NO: 5076 - RNA, 22 nt, Artificial Sequence
  SAMD9 targeting guide sequence portion
aaucuucacaguuuugaaucau

SEQ ID NO: 5077 - RNA, 22 nt, Artificial Sequence
  SAMD9 targeting guide sequence portion
aaugauucaaaacugugaagau

SEQ ID NO: 5078 - RNA, 22 nt, Artificial Sequence
  SAMD9 targeting guide sequence portion
acugugaagauucuucuaaacc

SEQ ID NO: 5079 - RNA, 22 nt, Artificial Sequence
  SAMD9 targeting guide sequence portion
acuugaagcaaugauucaaaac

SEQ ID NO: 5080 - RNA, 22 nt, Artificial Sequence
  SAMD9 targeting guide sequence portion
acuuguugguuuagaagaaucu

SEQ ID NO: 5081 - RNA, 22 nt, Artificial Sequence
  SAMD9 targeting guide sequence portion
agaagaaucuucacaguuuuga

SEQ ID NO: 5082 - RNA, 22 nt, Artificial Sequence
  SAMD9 targeting guide sequence portion
agaaucuucacaguuuugaauc

SEQ ID NO: 5083 - RNA, 22 nt, Artificial Sequence
  SAMD9 targeting guide sequence portion
agcaaugauucaaaacugugaa

SEQ ID NO: 5084 - RNA, 22 nt, Artificial Sequence
  SAMD9 targeting guide sequence portion
aucuucacaguuuugaaucauu

SEQ ID NO: 5085 - RNA, 22 nt, Artificial Sequence
  SAMD9 targeting guide sequence portion
augauucaaaacugugaagauu

SEQ ID NO: 5086 - RNA, 22 nt, Artificial Sequence
  SAMD9 targeting guide sequence portion
auucaaaacugugaagauucuu

SEQ ID NO: 5087 - RNA, 22 nt, Artificial Sequence
  SAMD9 targeting guide sequence portion
caaaacugugaagauucuucua

SEQ ID NO: 5088 - RNA, 22 nt, Artificial Sequence
  SAMD9 targeting guide sequence portion
caaugauucaaaacugugaaga

SEQ ID NO: 5089 - RNA, 22 nt, Artificial Sequence
  SAMD9 targeting guide sequence portion
cugugaagauucuucuaaacca

SEQ ID NO: 5090 - RNA, 22 nt, Artificial Sequence
  SAMD9 targeting guide sequence portion
cuucacaguuuugaaucauugc

SEQ ID NO: 5091 - RNA, 22 nt, Artificial Sequence
  SAMD9 targeting guide sequence portion
cuugaagcaaugauucaaaacu

SEQ ID NO: 5092 - RNA, 22 nt, Artificial Sequence
  SAMD9 targeting guide sequence portion
cuuguugguuuagaagaaucuu

SEQ ID NO: 5093 - RNA, 22 nt, Artificial Sequence
  SAMD9 targeting guide sequence portion
gaagaaucuucacaguuuugaa

SEQ ID NO: 5094 - RNA, 22 nt, Artificial Sequence
  SAMD9 targeting guide sequence portion
gaagauucuucuaaaccaacaa

SEQ ID NO: 5095 - RNA, 22 nt, Artificial Sequence
  SAMD9 targeting guide sequence portion
gaagcaaugauucaaaacugug

SEQ ID NO: 5096 - RNA, 22 nt, Artificial Sequence
  SAMD9 targeting guide sequence portion
gaaucuucacaguuuugaauca

SEQ ID NO: 5097 - RNA, 22 nt, Artificial Sequence
  SAMD9 targeting guide sequence portion
gacuugaagcaaugauucaaaa

SEQ ID NO: 5098 - RNA, 22 nt, Artificial Sequence
  SAMD9 targeting guide sequence portion
gauucaaaacugugaagauucu

SEQ ID NO: 5099 - RNA, 22 nt, Artificial Sequence
  SAMD9 targeting guide sequence portion
gcaaugauucaaaacugugaag

SEQ ID NO: 5100 - RNA, 22 nt, Artificial Sequence
  SAMD9 targeting guide sequence portion
gguacuuguugguuuagaagaa

SEQ ID NO: 5101 - RNA, 22 nt, Artificial Sequence
  SAMD9 targeting guide sequence portion
gguuuagaagaaucuucacagu

SEQ ID NO: 5102 - RNA, 22 nt, Artificial Sequence
  SAMD9 targeting guide sequence portion
guacuuguugguuuagaagaau

SEQ ID NO: 5103 - RNA, 22 nt, Artificial Sequence
  SAMD9 targeting guide sequence portion
gugaagauucuucuaaaccaac

SEQ ID NO: 5104 - RNA, 22 nt, Artificial Sequence
  SAMD9 targeting guide sequence portion
guugguuuagaagaaucuucac

SEQ ID NO: 5105 - RNA, 22 nt, Artificial Sequence
  SAMD9 targeting guide sequence portion
guuuagaagaaucuucacaguu

SEQ ID NO: 5106 - RNA, 22 nt, Artificial Sequence
  SAMD9 targeting guide sequence portion
uacuuguugguuuagaagaauc

SEQ ID NO: 5107 - RNA, 22 nt, Artificial Sequence
  SAMD9 targeting guide sequence portion
uagaagaaucuucacaguuuug

SEQ ID NO: 5108 - RNA, 22 nt, Artificial Sequence
  SAMD9 targeting guide sequence portion
ucaaaacugugaagauucuucu

SEQ ID NO: 5109 - RNA, 22 nt, Artificial Sequence
  SAMD9 targeting guide sequence portion
ucacaguuuugaaucauugcuu

SEQ ID NO: 5110 - RNA, 22 nt, Artificial Sequence
  SAMD9 targeting guide sequence portion
ucuucacaguuuugaaucauug

SEQ ID NO: 5111 - RNA, 22 nt, Artificial Sequence
  SAMD9 targeting guide sequence portion
ugaagauucuucuaaaccaaca

SEQ ID NO: 5112 - RNA, 22 nt, Artificial Sequence
  SAMD9 targeting guide sequence portion
ugaagcaaugauucaaaacugu

SEQ ID NO: 5113 - RNA, 22 nt, Artificial Sequence
  SAMD9 targeting guide sequence portion
ugauucaaaacugugaagauuc

SEQ ID NO: 5114 - RNA, 22 nt, Artificial Sequence
  SAMD9 targeting guide sequence portion
ugguacuuguugguuuagaaga

SEQ ID NO: 5115 - RNA, 22 nt, Artificial Sequence
  SAMD9 targeting guide sequence portion
ugguuuagaagaaucuucacag

SEQ ID NO: 5116 - RNA, 22 nt, Artificial Sequence
  SAMD9 targeting guide sequence portion
ugugaagauucuucuaaaccaa

SEQ ID NO: 5117 - RNA, 22 nt, Artificial Sequence
  SAMD9 targeting guide sequence portion
uguugguuuagaagaaucuuca

SEQ ID NO: 5118 - RNA, 22 nt, Artificial Sequence
  SAMD9 targeting guide sequence portion
uuagaagaaucuucacaguuuu

SEQ ID NO: 5119 - RNA, 22 nt, Artificial Sequence
  SAMD9 targeting guide sequence portion
uucaaaacugugaagauucuuc

SEQ ID NO: 5120 - RNA, 22 nt, Artificial Sequence
  SAMD9 targeting guide sequence portion
uucacaguuuugaaucauugcu

SEQ ID NO: 5121 - RNA, 22 nt, Artificial Sequence
  SAMD9 targeting guide sequence portion
uugaagcaaugauucaaaacug

SEQ ID NO: 5122 - RNA, 22 nt, Artificial Sequence
  SAMD9 targeting guide sequence portion
uugguacuuguugguuuagaag

SEQ ID NO: 5123 - RNA, 22 nt, Artificial Sequence
  SAMD9 targeting guide sequence portion
uugguuuagaagaaucuucaca

SEQ ID NO: 5124 - RNA, 22 nt, Artificial Sequence
  SAMD9 targeting guide sequence portion
uuguugguuuagaagaaucuuc

SEQ ID NO: 5125 - RNA, 22 nt, Artificial Sequence
  SAMD9 targeting guide sequence portion
uuuagaagaaucuucacaguuu

SEQ ID NO: 5126 - RNA, 20 nt, Artificial Sequence
  SAMD9 targeting guide sequence portion
aaagacuugaagcaaugauu

SEQ ID NO: 5127 - RNA, 20 nt, Artificial Sequence
  SAMD9 targeting guide sequence portion
aagaaucugcacaguuugaa

SEQ ID NO: 5128 - RNA, 20 nt, Artificial Sequence
  SAMD9 targeting guide sequence portion
aagacuugaagcaaugauuc

SEQ ID NO: 5129 - RNA, 20 nt, Artificial Sequence
  SAMD9 targeting guide sequence portion
aagcaaugauucaaacugug

SEQ ID NO: 5130 - RNA, 20 nt, Artificial Sequence
  SAMD9 targeting guide sequence portion
aaucugcacaguuugaauca

SEQ ID NO: 5131 - RNA, 20 nt, Artificial Sequence
  SAMD9 targeting guide sequence portion
aaugauucaaacugugcaga

SEQ ID NO: 5132 - RNA, 20 nt, Artificial Sequence
  SAMD9 targeting guide sequence portion
acaguuugaaucauugcuuc

SEQ ID NO: 5133 - RNA, 20 nt, Artificial Sequence
  SAMD9 targeting guide sequence portion
acuugaagcaaugauucaaa

SEQ ID NO: 5134 - RNA, 20 nt, Artificial Sequence
  SAMD9 targeting guide sequence portion
agaagaaucugcacaguuug

SEQ ID NO: 5135 - RNA, 20 nt, Artificial Sequence
  SAMD9 targeting guide sequence portion
agaaucugcacaguuugaau

SEQ ID NO: 5136 - RNA, 20 nt, Artificial Sequence
  SAMD9 targeting guide sequence portion
agacuugaagcaaugauuca

SEQ ID NO: 5137 - RNA, 20 nt, Artificial Sequence
  SAMD9 targeting guide sequence portion
agcaaugauucaaacugugc

SEQ ID NO: 5138 - RNA, 20 nt, Artificial Sequence
  SAMD9 targeting guide sequence portion
aguuugaaucauugcuucaa

SEQ ID NO: 5139 - RNA, 20 nt, Artificial Sequence
  SAMD9 targeting guide sequence portion
aucugcacaguuugaaucau

SEQ ID NO: 5140 - RNA, 20 nt, Artificial Sequence
  SAMD9 targeting guide sequence portion
augauucaaacugugcagau

SEQ ID NO: 5141 - RNA, 20 nt, Artificial Sequence
  SAMD9 targeting guide sequence portion
auucaaacugugcagauucu

SEQ ID NO: 5142 - RNA, 20 nt, Artificial Sequence
  SAMD9 targeting guide sequence portion
caaacugugcagauucuucu

SEQ ID NO: 5143 - RNA, 20 nt, Artificial Sequence
  SAMD9 targeting guide sequence portion
caaugauucaaacugugcag

SEQ ID NO: 5144 - RNA, 20 nt, Artificial Sequence
  SAMD9 targeting guide sequence portion
cacaguuugaaucauugcuu

SEQ ID NO: 5145 - RNA, 20 nt, Artificial Sequence
  SAMD9 targeting guide sequence portion
caguuugaaucauugcuuca

SEQ ID NO: 5146 - RNA, 20 nt, Artificial Sequence
  SAMD9 targeting guide sequence portion
cugcacaguuugaaucauug

SEQ ID NO: 5147 - RNA, 20 nt, Artificial Sequence
  SAMD9 targeting guide sequence portion
cuugaagcaaugauucaaac

SEQ ID NO: 5148 - RNA, 20 nt, Artificial Sequence
  SAMD9 targeting guide sequence portion
gaaagacuugaagcaaugau

SEQ ID NO: 5149 - RNA, 20 nt, Artificial Sequence
  SAMD9 targeting guide sequence portion
gaagaaucugcacaguuuga

SEQ ID NO: 5150 - RNA, 20 nt, Artificial Sequence
  SAMD9 targeting guide sequence portion
gaagcaaugauucaaacugu

SEQ ID NO: 5151 - RNA, 20 nt, Artificial Sequence
  SAMD9 targeting guide sequence portion
gaaucugcacaguuugaauc

SEQ ID NO: 5152 - RNA, 20 nt, Artificial Sequence
  SAMD9 targeting guide sequence portion
gacuugaagcaaugauucaa

SEQ ID NO: 5153 - RNA, 20 nt, Artificial Sequence
  SAMD9 targeting guide sequence portion
gauucaaacugugcagauuc

SEQ ID NO: 5154 - RNA, 20 nt, Artificial Sequence
  SAMD9 targeting guide sequence portion
gcaaugauucaaacugugca

SEQ ID NO: 5155 - RNA, 20 nt, Artificial Sequence
  SAMD9 targeting guide sequence portion
gcacaguuugaaucauugcu

SEQ ID NO: 5156 - RNA, 20 nt, Artificial Sequence
  SAMD9 targeting guide sequence portion
gguuuagaagaaucugcaca

SEQ ID NO: 5157 - RNA, 20 nt, Artificial Sequence
  SAMD9 targeting guide sequence portion
guuuagaagaaucugcacag

SEQ ID NO: 5158 - RNA, 20 nt, Artificial Sequence
  SAMD9 targeting guide sequence portion
guuugaaucauugcuucaag

SEQ ID NO: 5159 - RNA, 20 nt, Artificial Sequence
  SAMD9 targeting guide sequence portion
uagaagaaucugcacaguuu

SEQ ID NO: 5160 - RNA, 20 nt, Artificial Sequence
  SAMD9 targeting guide sequence portion
ucaaacugugcagauucuuc

SEQ ID NO: 5161 - RNA, 20 nt, Artificial Sequence
  SAMD9 targeting guide sequence portion
ucugcacaguuugaaucauu

SEQ ID NO: 5162 - RNA, 20 nt, Artificial Sequence
  SAMD9 targeting guide sequence portion
ugaagcaaugauucaaacug

SEQ ID NO: 5163 - RNA, 20 nt, Artificial Sequence
  SAMD9 targeting guide sequence portion
ugauucaaacugugcagauu

SEQ ID NO: 5164 - RNA, 20 nt, Artificial Sequence
  SAMD9 targeting guide sequence portion
ugcacaguuugaaucauugc

SEQ ID NO: 5165 - RNA, 20 nt, Artificial Sequence
  SAMD9 targeting guide sequence portion
ugguuuagaagaaucugcac

SEQ ID NO: 5166 - RNA, 20 nt, Artificial Sequence
  SAMD9 targeting guide sequence portion
uuagaagaaucugcacaguu

SEQ ID NO: 5167 - RNA, 20 nt, Artificial Sequence
  SAMD9 targeting guide sequence portion
uucaaacugugcagauucuu

SEQ ID NO: 5168 - RNA, 20 nt, Artificial Sequence
  SAMD9 targeting guide sequence portion
uugaagcaaugauucaaacu

SEQ ID NO: 5169 - RNA, 20 nt, Artificial Sequence
  SAMD9 targeting guide sequence portion
uuuagaagaaucugcacagu

SEQ ID NO: 5170 - RNA, 21 nt, Artificial Sequence
  SAMD9 targeting guide sequence portion
aaagacuugaagcaaugauuc

SEQ ID NO: 5171 - RNA, 21 nt, Artificial Sequence
  SAMD9 targeting guide sequence portion
aagaaucugcacaguuugaau

SEQ ID NO: 5172 - RNA, 21 nt, Artificial Sequence
  SAMD9 targeting guide sequence portion
aagacuugaagcaaugauuca

SEQ ID NO: 5173 - RNA, 21 nt, Artificial Sequence
  SAMD9 targeting guide sequence portion
aagcaaugauucaaacugugc

SEQ ID NO: 5174 - RNA, 21 nt, Artificial Sequence
  SAMD9 targeting guide sequence portion
aaucugcacaguuugaaucau

SEQ ID NO: 5175 - RNA, 21 nt, Artificial Sequence
  SAMD9 targeting guide sequence portion
aaugauucaaacugugcagau

SEQ ID NO: 5176 - RNA, 21 nt, Artificial Sequence
  SAMD9 targeting guide sequence portion
acaguuugaaucauugcuuca

SEQ ID NO: 5177 - RNA, 21 nt, Artificial Sequence
  SAMD9 targeting guide sequence portion
acuugaagcaaugauucaaac

SEQ ID NO: 5178 - RNA, 21 nt, Artificial Sequence
  SAMD9 targeting guide sequence portion
agaagaaucugcacaguuuga

SEQ ID NO: 5179 - RNA, 21 nt, Artificial Sequence
  SAMD9 targeting guide sequence portion
agaaucugcacaguuugaauc

SEQ ID NO: 5180 - RNA, 21 nt, Artificial Sequence
  SAMD9 targeting guide sequence portion
agacuugaagcaaugauucaa

SEQ ID NO: 5181 - RNA, 21 nt, Artificial Sequence
  SAMD9 targeting guide sequence portion
agcaaugauucaaacugugca

SEQ ID NO: 5182 - RNA, 21 nt, Artificial Sequence
  SAMD9 targeting guide sequence portion
aguuugaaucauugcuucaag

SEQ ID NO: 5183 - RNA, 21 nt, Artificial Sequence
  SAMD9 targeting guide sequence portion
aucugcacaguuugaaucauu

SEQ ID NO: 5184 - RNA, 21 nt, Artificial Sequence
  SAMD9 targeting guide sequence portion
augauucaaacugugcagauu

SEQ ID NO: 5185 - RNA, 21 nt, Artificial Sequence
  SAMD9 targeting guide sequence portion
auucaaacugugcagauucuu

SEQ ID NO: 5186 - RNA, 21 nt, Artificial Sequence
  SAMD9 targeting guide sequence portion
caaacugugcagauucuucua

SEQ ID NO: 5187 - RNA, 21 nt, Artificial Sequence
  SAMD9 targeting guide sequence portion
caaugauucaaacugugcaga

SEQ ID NO: 5188 - RNA, 21 nt, Artificial Sequence
  SAMD9 targeting guide sequence portion
cacaguuugaaucauugcuuc

SEQ ID NO: 5189 - RNA, 21 nt, Artificial Sequence
  SAMD9 targeting guide sequence portion
caguuugaaucauugcuucaa

SEQ ID NO: 5190 - RNA, 21 nt, Artificial Sequence
  SAMD9 targeting guide sequence portion
cugcacaguuugaaucauugc

SEQ ID NO: 5191 - RNA, 21 nt, Artificial Sequence
  SAMD9 targeting guide sequence portion
cuugaagcaaugauucaaacu

SEQ ID NO: 5192 - RNA, 21 nt, Artificial Sequence
  SAMD9 targeting guide sequence portion
gaaagacuugaagcaaugauu

SEQ ID NO: 5193 - RNA, 21 nt, Artificial Sequence
  SAMD9 targeting guide sequence portion
gaagaaucugcacaguuugaa

SEQ ID NO: 5194 - RNA, 21 nt, Artificial Sequence
  SAMD9 targeting guide sequence portion
gaagcaaugauucaaacugug

SEQ ID NO: 5195 - RNA, 21 nt, Artificial Sequence
  SAMD9 targeting guide sequence portion
gaaucugcacaguuugaauca

SEQ ID NO: 5196 - RNA, 21 nt, Artificial Sequence
  SAMD9 targeting guide sequence portion
gacuugaagcaaugauucaaa

SEQ ID NO: 5197 - RNA, 21 nt, Artificial Sequence
  SAMD9 targeting guide sequence portion
gauucaaacugugcagauucu

SEQ ID NO: 5198 - RNA, 21 nt, Artificial Sequence
  SAMD9 targeting guide sequence portion
gcaaugauucaaacugugcag

SEQ ID NO: 5199 - RNA, 21 nt, Artificial Sequence
  SAMD9 targeting guide sequence portion
gcacaguuugaaucauugcuu

SEQ ID NO: 5200 - RNA, 21 nt, Artificial Sequence
  SAMD9 targeting guide sequence portion
gguuuagaagaaucugcacag

SEQ ID NO: 5201 - RNA, 21 nt, Artificial Sequence
  SAMD9 targeting guide sequence portion
guuuagaagaaucugcacagu

SEQ ID NO: 5202 - RNA, 21 nt, Artificial Sequence
  SAMD9 targeting guide sequence portion
guuugaaucauugcuucaagu

SEQ ID NO: 5203 - RNA, 21 nt, Artificial Sequence
  SAMD9 targeting guide sequence portion
uagaagaaucugcacaguuug

SEQ ID NO: 5204 - RNA, 21 nt, Artificial Sequence
  SAMD9 targeting guide sequence portion
ucaaacugugcagauucuucu

SEQ ID NO: 5205 - RNA, 21 nt, Artificial Sequence
  SAMD9 targeting guide sequence portion
ucugcacaguuugaaucauug

SEQ ID NO: 5206 - RNA, 21 nt, Artificial Sequence
  SAMD9 targeting guide sequence portion
ugaaagacuugaagcaaugau

SEQ ID NO: 5207 - RNA, 21 nt, Artificial Sequence
  SAMD9 targeting guide sequence portion
ugaagcaaugauucaaacugu

SEQ ID NO: 5208 - RNA, 21 nt, Artificial Sequence
  SAMD9 targeting guide sequence portion
ugauucaaacugugcagauuc

SEQ ID NO: 5209 - RNA, 21 nt, Artificial Sequence
  SAMD9 targeting guide sequence portion
ugcacaguuugaaucauugcu

SEQ ID NO: 5210 - RNA, 21 nt, Artificial Sequence
  SAMD9 targeting guide sequence portion
ugguuuagaagaaucugcaca

SEQ ID NO: 5211 - RNA, 21 nt, Artificial Sequence
  SAMD9 targeting guide sequence portion
uuagaagaaucugcacaguuu

SEQ ID NO: 5212 - RNA, 21 nt, Artificial Sequence
  SAMD9 targeting guide sequence portion
uucaaacugugcagauucuuc

SEQ ID NO: 5213 - RNA, 21 nt, Artificial Sequence
  SAMD9 targeting guide sequence portion
uugaagcaaugauucaaacug

SEQ ID NO: 5214 - RNA, 21 nt, Artificial Sequence
  SAMD9 targeting guide sequence portion
uugguuuagaagaaucugcac

SEQ ID NO: 5215 - RNA, 21 nt, Artificial Sequence
  SAMD9 targeting guide sequence portion
uuuagaagaaucugcacaguu

SEQ ID NO: 5216 - RNA, 22 nt, Artificial Sequence
  SAMD9 targeting guide sequence portion
aaagacuugaagcaaugauuca

SEQ ID NO: 5217 - RNA, 22 nt, Artificial Sequence
  SAMD9 targeting guide sequence portion
aagaaucugcacaguuugaauc

SEQ ID NO: 5218 - RNA, 22 nt, Artificial Sequence
  SAMD9 targeting guide sequence portion
aagacuugaagcaaugauucaa

SEQ ID NO: 5219 - RNA, 22 nt, Artificial Sequence
  SAMD9 targeting guide sequence portion
aagcaaugauucaaacugugca

SEQ ID NO: 5220 - RNA, 22 nt, Artificial Sequence
  SAMD9 targeting guide sequence portion
aaucugcacaguuugaaucauu

SEQ ID NO: 5221 - RNA, 22 nt, Artificial Sequence
  SAMD9 targeting guide sequence portion
aaugauucaaacugugcagauu

SEQ ID NO: 5222 - RNA, 22 nt, Artificial Sequence
  SAMD9 targeting guide sequence portion
acaguuugaaucauugcuucaa

SEQ ID NO: 5223 - RNA, 22 nt, Artificial Sequence
  SAMD9 targeting guide sequence portion
acuugaagcaaugauucaaacu

SEQ ID NO: 5224 - RNA, 22 nt, Artificial Sequence
  SAMD9 targeting guide sequence portion
agaagaaucugcacaguuugaa

SEQ ID NO: 5225 - RNA, 22 nt, Artificial Sequence
  SAMD9 targeting guide sequence portion
agaaucugcacaguuugaauca

SEQ ID NO: 5226 - RNA, 22 nt, Artificial Sequence
  SAMD9 targeting guide sequence portion
agacuugaagcaaugauucaaa

SEQ ID NO: 5227 - RNA, 22 nt, Artificial Sequence
  SAMD9 targeting guide sequence portion
agcaaugauucaaacugugcag

SEQ ID NO: 5228 - RNA, 22 nt, Artificial Sequence
  SAMD9 targeting guide sequence portion
aguuugaaucauugcuucaagu

SEQ ID NO: 5229 - RNA, 22 nt, Artificial Sequence
  SAMD9 targeting guide sequence portion
aucugcacaguuugaaucauug

SEQ ID NO: 5230 - RNA, 22 nt, Artificial Sequence
  SAMD9 targeting guide sequence portion
augaaagacuugaagcaaugau

SEQ ID NO: 5231 - RNA, 22 nt, Artificial Sequence
  SAMD9 targeting guide sequence portion
augauucaaacugugcagauuc

SEQ ID NO: 5232 - RNA, 22 nt, Artificial Sequence
  SAMD9 targeting guide sequence portion
auucaaacugugcagauucuuc

SEQ ID NO: 5233 - RNA, 22 nt, Artificial Sequence
  SAMD9 targeting guide sequence portion
caaacugugcagauucuucuaa

SEQ ID NO: 5234 - RNA, 22 nt, Artificial Sequence
  SAMD9 targeting guide sequence portion
caaugauucaaacugugcagau

SEQ ID NO: 5235 - RNA, 22 nt, Artificial Sequence
  SAMD9 targeting guide sequence portion
cacaguuugaaucauugcuuca

SEQ ID NO: 5236 - RNA, 22 nt, Artificial Sequence
  SAMD9 targeting guide sequence portion
caguuugaaucauugcuucaag

SEQ ID NO: 5237 - RNA, 22 nt, Artificial Sequence
  SAMD9 targeting guide sequence portion
cugcacaguuugaaucauugcu

SEQ ID NO: 5238 - RNA, 22 nt, Artificial Sequence
  SAMD9 targeting guide sequence portion
cuugaagcaaugauucaaacug

SEQ ID NO: 5239 - RNA, 22 nt, Artificial Sequence
  SAMD9 targeting guide sequence portion
gaaagacuugaagcaaugauuc

SEQ ID NO: 5240 - RNA, 22 nt, Artificial Sequence
  SAMD9 targeting guide sequence portion
gaagaaucugcacaguuugaau

SEQ ID NO: 5241 - RNA, 22 nt, Artificial Sequence
  SAMD9 targeting guide sequence portion
gaagcaaugauucaaacugugc

SEQ ID NO: 5242 - RNA, 22 nt, Artificial Sequence
  SAMD9 targeting guide sequence portion
gaaucugcacaguuugaaucau

SEQ ID NO: 5243 - RNA, 22 nt, Artificial Sequence
  SAMD9 targeting guide sequence portion
gacuugaagcaaugauucaaac

SEQ ID NO: 5244 - RNA, 22 nt, Artificial Sequence
  SAMD9 targeting guide sequence portion
gauucaaacugugcagauucuu

SEQ ID NO: 5245 - RNA, 22 nt, Artificial Sequence
  SAMD9 targeting guide sequence portion
gcaaugauucaaacugugcaga

SEQ ID NO: 5246 - RNA, 22 nt, Artificial Sequence
  SAMD9 targeting guide sequence portion
gcacaguuugaaucauugcuuc

SEQ ID NO: 5247 - RNA, 22 nt, Artificial Sequence
  SAMD9 targeting guide sequence portion
gguuuagaagaaucugcacagu

SEQ ID NO: 5248 - RNA, 22 nt, Artificial Sequence
  SAMD9 targeting guide sequence portion
guugguuuagaagaaucugcac

SEQ ID NO: 5249 - RNA, 22 nt, Artificial Sequence
  SAMD9 targeting guide sequence portion
guuuagaagaaucugcacaguu

SEQ ID NO: 5250 - RNA, 22 nt, Artificial Sequence
  SAMD9 targeting guide sequence portion
guuugaaucauugcuucaaguc

SEQ ID NO: 5251 - RNA, 22 nt, Artificial Sequence
  SAMD9 targeting guide sequence portion
uagaagaaucugcacaguuuga

SEQ ID NO: 5252 - RNA, 22 nt, Artificial Sequence
  SAMD9 targeting guide sequence portion
ucaaacugugcagauucuucua

SEQ ID NO: 5253 - RNA, 22 nt, Artificial Sequence
  SAMD9 targeting guide sequence portion
ucugcacaguuugaaucauugc

SEQ ID NO: 5254 - RNA, 22 nt, Artificial Sequence
  SAMD9 targeting guide sequence portion
ugaaagacuugaagcaaugauu

SEQ ID NO: 5255 - RNA, 22 nt, Artificial Sequence
  SAMD9 targeting guide sequence portion
ugaagcaaugauucaaacugug

SEQ ID NO: 5256 - RNA, 22 nt, Artificial Sequence
  SAMD9 targeting guide sequence portion
ugauucaaacugugcagauucu

SEQ ID NO: 5257 - RNA, 22 nt, Artificial Sequence
  SAMD9 targeting guide sequence portion
ugcacaguuugaaucauugcuu

SEQ ID NO: 5258 - RNA, 22 nt, Artificial Sequence
  SAMD9 targeting guide sequence portion
ugguuuagaagaaucugcacag

SEQ ID NO: 5259 - RNA, 22 nt, Artificial Sequence
  SAMD9 targeting guide sequence portion
uuagaagaaucugcacaguuug

SEQ ID NO: 5260 - RNA, 22 nt, Artificial Sequence
  SAMD9 targeting guide sequence portion
uucaaacugugcagauucuucu

SEQ ID NO: 5261 - RNA, 22 nt, Artificial Sequence
  SAMD9 targeting guide sequence portion
uugaagcaaugauucaaacugu

SEQ ID NO: 5262 - RNA, 22 nt, Artificial Sequence
  SAMD9 targeting guide sequence portion
uugguuuagaagaaucugcaca

SEQ ID NO: 5263 - RNA, 22 nt, Artificial Sequence
  SAMD9 targeting guide sequence portion
uuuagaagaaucugcacaguuu

SEQ ID NO: 5264 - RNA, 20 nt, Artificial Sequence
  SAMD9 targeting guide sequence portion
aaaagaggaagacuucuauc

SEQ ID NO: 5265 - RNA, 20 nt, Artificial Sequence
  SAMD9 targeting guide sequence portion
aaagaggaagacuucuauca

SEQ ID NO: 5266 - RNA, 20 nt, Artificial Sequence
  SAMD9 targeting guide sequence portion
aagacuucuaucaagguggc

SEQ ID NO: 5267 - RNA, 20 nt, Artificial Sequence
  SAMD9 targeting guide sequence portion
aagaggaagacuucuaucaa

SEQ ID NO: 5268 - RNA, 20 nt, Artificial Sequence
  SAMD9 targeting guide sequence portion
aagguggcaaagugucaugg

SEQ ID NO: 5269 - RNA, 20 nt, Artificial Sequence
  SAMD9 targeting guide sequence portion
acacuuugccaccuugauag

SEQ ID NO: 5270 - RNA, 20 nt, Artificial Sequence
  SAMD9 targeting guide sequence portion
accaugacacuuugccaccu

SEQ ID NO: 5271 - RNA, 20 nt, Artificial Sequence
  SAMD9 targeting guide sequence portion
accuugauagaagucuuccu

SEQ ID NO: 5272 - RNA, 20 nt, Artificial Sequence
  SAMD9 targeting guide sequence portion
acuucuaucaagguggcaaa

SEQ ID NO: 5273 - RNA, 20 nt, Artificial Sequence
  SAMD9 targeting guide sequence portion
acuuugccaccuugauagaa

SEQ ID NO: 5274 - RNA, 20 nt, Artificial Sequence
  SAMD9 targeting guide sequence portion
agacuucuaucaagguggca

SEQ ID NO: 5275 - RNA, 20 nt, Artificial Sequence
  SAMD9 targeting guide sequence portion
agaggaagacuucuaucaag

SEQ ID NO: 5276 - RNA, 20 nt, Artificial Sequence
  SAMD9 targeting guide sequence portion
aggaagacuucuaucaaggu

SEQ ID NO: 5277 - RNA, 20 nt, Artificial Sequence
  SAMD9 targeting guide sequence portion
aucaaaagaggaagacuucu

SEQ ID NO: 5278 - RNA, 20 nt, Artificial Sequence
  SAMD9 targeting guide sequence portion
aucaagguggcaaaguguca

SEQ ID NO: 5279 - RNA, 20 nt, Artificial Sequence
  SAMD9 targeting guide sequence portion
augacacuuugccaccuuga

SEQ ID NO: 5280 - RNA, 20 nt, Artificial Sequence
  SAMD9 targeting guide sequence portion
caaaagaggaagacuucuau

SEQ ID NO: 5281 - RNA, 20 nt, Artificial Sequence
  SAMD9 targeting guide sequence portion
caagguggcaaagugucaug

SEQ ID NO: 5282 - RNA, 20 nt, Artificial Sequence
  SAMD9 targeting guide sequence portion
caccaugacacuuugccacc

SEQ ID NO: 5283 - RNA, 20 nt, Artificial Sequence
  SAMD9 targeting guide sequence portion
caccuugauagaagucuucc

SEQ ID NO: 5284 - RNA, 20 nt, Artificial Sequence
  SAMD9 targeting guide sequence portion
cacuuugccaccuugauaga

SEQ ID NO: 5285 - RNA, 20 nt, Artificial Sequence
  SAMD9 targeting guide sequence portion
caucaaaagaggaagacuuc

SEQ ID NO: 5286 - RNA, 20 nt, Artificial Sequence
  SAMD9 targeting guide sequence portion
caugacacuuugccaccuug

SEQ ID NO: 5287 - RNA, 20 nt, Artificial Sequence
  SAMD9 targeting guide sequence portion
ccaccaugacacuuugccac

SEQ ID NO: 5288 - RNA, 20 nt, Artificial Sequence
  SAMD9 targeting guide sequence portion
ccaccuugauagaagucuuc

SEQ ID NO: 5289 - RNA, 20 nt, Artificial Sequence
  SAMD9 targeting guide sequence portion
ccaugacacuuugccaccuu

SEQ ID NO: 5290 - RNA, 20 nt, Artificial Sequence
  SAMD9 targeting guide sequence portion
ccuugauagaagucuuccuc

SEQ ID NO: 5291 - RNA, 20 nt, Artificial Sequence
  SAMD9 targeting guide sequence portion
cuaucaagguggcaaagugu

SEQ ID NO: 5292 - RNA, 20 nt, Artificial Sequence
  SAMD9 targeting guide sequence portion
cuucuaucaagguggcaaag

SEQ ID NO: 5293 - RNA, 20 nt, Artificial Sequence
  SAMD9 targeting guide sequence portion
cuugauagaagucuuccucu

SEQ ID NO: 5294 - RNA, 20 nt, Artificial Sequence
  SAMD9 targeting guide sequence portion
cuuugccaccuugauagaag

SEQ ID NO: 5295 - RNA, 20 nt, Artificial Sequence
  SAMD9 targeting guide sequence portion
gaagacuucuaucaaggugg

SEQ ID NO: 5296 - RNA, 20 nt, Artificial Sequence
  SAMD9 targeting guide sequence portion
gacacuuugccaccuugaua

SEQ ID NO: 5297 - RNA, 20 nt, Artificial Sequence
  SAMD9 targeting guide sequence portion
gacuucuaucaagguggcaa

SEQ ID NO: 5298 - RNA, 20 nt, Artificial Sequence
  SAMD9 targeting guide sequence portion
gaggaagacuucuaucaagg

SEQ ID NO: 5299 - RNA, 20 nt, Artificial Sequence
  SAMD9 targeting guide sequence portion
gcaucaaaagaggaagacuu

SEQ ID NO: 5300 - RNA, 20 nt, Artificial Sequence
  SAMD9 targeting guide sequence portion
gccaccuugauagaagucuu

SEQ ID NO: 5301 - RNA, 20 nt, Artificial Sequence
  SAMD9 targeting guide sequence portion
ggaagacuucuaucaaggug

SEQ ID NO: 5302 - RNA, 20 nt, Artificial Sequence
  SAMD9 targeting guide sequence portion
guuccaccaugacacuuugc

SEQ ID NO: 5303 - RNA, 20 nt, Artificial Sequence
  SAMD9 targeting guide sequence portion
uaucaagguggcaaaguguc

SEQ ID NO: 5304 - RNA, 20 nt, Artificial Sequence
  SAMD9 targeting guide sequence portion
ucaaaagaggaagacuucua

SEQ ID NO: 5305 - RNA, 20 nt, Artificial Sequence
  SAMD9 targeting guide sequence portion
ucaagguggcaaagugucau

SEQ ID NO: 5306 - RNA, 20 nt, Artificial Sequence
  SAMD9 targeting guide sequence portion
uccaccaugacacuuugcca

SEQ ID NO: 5307 - RNA, 20 nt, Artificial Sequence
  SAMD9 targeting guide sequence portion
ucuaucaagguggcaaagug

SEQ ID NO: 5308 - RNA, 20 nt, Artificial Sequence
  SAMD9 targeting guide sequence portion
ugacacuuugccaccuugau

SEQ ID NO: 5309 - RNA, 20 nt, Artificial Sequence
  SAMD9 targeting guide sequence portion
ugauagaagucuuccucuuu

SEQ ID NO: 5310 - RNA, 20 nt, Artificial Sequence
  SAMD9 targeting guide sequence portion
ugccaccuugauagaagucu

SEQ ID NO: 5311 - RNA, 20 nt, Artificial Sequence
  SAMD9 targeting guide sequence portion
uuccaccaugacacuuugcc

SEQ ID NO: 5312 - RNA, 20 nt, Artificial Sequence
  SAMD9 targeting guide sequence portion
uucuaucaagguggcaaagu

SEQ ID NO: 5313 - RNA, 20 nt, Artificial Sequence
  SAMD9 targeting guide sequence portion
uugauagaagucuuccucuu

SEQ ID NO: 5314 - RNA, 20 nt, Artificial Sequence
  SAMD9 targeting guide sequence portion
uugccaccuugauagaaguc

SEQ ID NO: 5315 - RNA, 20 nt, Artificial Sequence
  SAMD9 targeting guide sequence portion
uuugccaccuugauagaagu

SEQ ID NO: 5316 - RNA, 21 nt, Artificial Sequence
  SAMD9 targeting guide sequence portion
aaaagaggaagacuucuauca

SEQ ID NO: 5317 - RNA, 21 nt, Artificial Sequence
  SAMD9 targeting guide sequence portion
aaagaggaagacuucuaucaa

SEQ ID NO: 5318 - RNA, 21 nt, Artificial Sequence
  SAMD9 targeting guide sequence portion
aagacuucuaucaagguggca

SEQ ID NO: 5319 - RNA, 21 nt, Artificial Sequence
  SAMD9 targeting guide sequence portion
aagaggaagacuucuaucaag

SEQ ID NO: 5320 - RNA, 21 nt, Artificial Sequence
  SAMD9 targeting guide sequence portion
aagguggcaaagugucauggu

SEQ ID NO: 5321 - RNA, 21 nt, Artificial Sequence
  SAMD9 targeting guide sequence portion
acacuuugccaccuugauaga

SEQ ID NO: 5322 - RNA, 21 nt, Artificial Sequence
  SAMD9 targeting guide sequence portion
accaugacacuuugccaccuu

SEQ ID NO: 5323 - RNA, 21 nt, Artificial Sequence
  SAMD9 targeting guide sequence portion
accuugauagaagucuuccuc

SEQ ID NO: 5324 - RNA, 21 nt, Artificial Sequence
  SAMD9 targeting guide sequence portion
acuucuaucaagguggcaaag

SEQ ID NO: 5325 - RNA, 21 nt, Artificial Sequence
  SAMD9 targeting guide sequence portion
acuuugccaccuugauagaag

SEQ ID NO: 5326 - RNA, 21 nt, Artificial Sequence
  SAMD9 targeting guide sequence portion
agacuucuaucaagguggcaa

SEQ ID NO: 5327 - RNA, 21 nt, Artificial Sequence
  SAMD9 targeting guide sequence portion
agaggaagacuucuaucaagg

SEQ ID NO: 5328 - RNA, 21 nt, Artificial Sequence
  SAMD9 targeting guide sequence portion
aggaagacuucuaucaaggug

SEQ ID NO: 5329 - RNA, 21 nt, Artificial Sequence
  SAMD9 targeting guide sequence portion
aguuccaccaugacacuuugc

SEQ ID NO: 5330 - RNA, 21 nt, Artificial Sequence
  SAMD9 targeting guide sequence portion
aucaaaagaggaagacuucua

SEQ ID NO: 5331 - RNA, 21 nt, Artificial Sequence
  SAMD9 targeting guide sequence portion
aucaagguggcaaagugucau

SEQ ID NO: 5332 - RNA, 21 nt, Artificial Sequence
  SAMD9 targeting guide sequence portion
augacacuuugccaccuugau

SEQ ID NO: 5333 - RNA, 21 nt, Artificial Sequence
  SAMD9 targeting guide sequence portion
caaaagaggaagacuucuauc

SEQ ID NO: 5334 - RNA, 21 nt, Artificial Sequence
  SAMD9 targeting guide sequence portion
caagguggcaaagugucaugg

SEQ ID NO: 5335 - RNA, 21 nt, Artificial Sequence
  SAMD9 targeting guide sequence portion
caccaugacacuuugccaccu

SEQ ID NO: 5336 - RNA, 21 nt, Artificial Sequence
  SAMD9 targeting guide sequence portion
caccuugauagaagucuuccu

SEQ ID NO: 5337 - RNA, 21 nt, Artificial Sequence
  SAMD9 targeting guide sequence portion
cacuuugccaccuugauagaa

SEQ ID NO: 5338 - RNA, 21 nt, Artificial Sequence
  SAMD9 targeting guide sequence portion
caucaaaagaggaagacuucu

SEQ ID NO: 5339 - RNA, 21 nt, Artificial Sequence
  SAMD9 targeting guide sequence portion
caugacacuuugccaccuuga

SEQ ID NO: 5340 - RNA, 21 nt, Artificial Sequence
  SAMD9 targeting guide sequence portion
ccaccaugacacuuugccacc

SEQ ID NO: 5341 - RNA, 21 nt, Artificial Sequence
  SAMD9 targeting guide sequence portion
ccaccuugauagaagucuucc

SEQ ID NO: 5342 - RNA, 21 nt, Artificial Sequence
  SAMD9 targeting guide sequence portion
ccaugacacuuugccaccuug

SEQ ID NO: 5343 - RNA, 21 nt, Artificial Sequence
  SAMD9 targeting guide sequence portion
ccuugauagaagucuuccucu

SEQ ID NO: 5344 - RNA, 21 nt, Artificial Sequence
  SAMD9 targeting guide sequence portion
cuaucaagguggcaaaguguc

SEQ ID NO: 5345 - RNA, 21 nt, Artificial Sequence
  SAMD9 targeting guide sequence portion
cuucuaucaagguggcaaagu

SEQ ID NO: 5346 - RNA, 21 nt, Artificial Sequence
  SAMD9 targeting guide sequence portion
cuugauagaagucuuccucuu

SEQ ID NO: 5347 - RNA, 21 nt, Artificial Sequence
  SAMD9 targeting guide sequence portion
cuuugccaccuugauagaagu

SEQ ID NO: 5348 - RNA, 21 nt, Artificial Sequence
  SAMD9 targeting guide sequence portion
gaagacuucuaucaagguggc

SEQ ID NO: 5349 - RNA, 21 nt, Artificial Sequence
  SAMD9 targeting guide sequence portion
gacacuuugccaccuugauag

SEQ ID NO: 5350 - RNA, 21 nt, Artificial Sequence
  SAMD9 targeting guide sequence portion
gacuucuaucaagguggcaaa

SEQ ID NO: 5351 - RNA, 21 nt, Artificial Sequence
  SAMD9 targeting guide sequence portion
gaggaagacuucuaucaaggu

SEQ ID NO: 5352 - RNA, 21 nt, Artificial Sequence
  SAMD9 targeting guide sequence portion
gcaucaaaagaggaagacuuc

SEQ ID NO: 5353 - RNA, 21 nt, Artificial Sequence
  SAMD9 targeting guide sequence portion
gccaccuugauagaagucuuc

SEQ ID NO: 5354 - RNA, 21 nt, Artificial Sequence
  SAMD9 targeting guide sequence portion
ggaagacuucuaucaaggugg

SEQ ID NO: 5355 - RNA, 21 nt, Artificial Sequence
  SAMD9 targeting guide sequence portion
ggcaucaaaagaggaagacuu

SEQ ID NO: 5356 - RNA, 21 nt, Artificial Sequence
  SAMD9 targeting guide sequence portion
guuccaccaugacacuuugcc

SEQ ID NO: 5357 - RNA, 21 nt, Artificial Sequence
  SAMD9 targeting guide sequence portion
uaucaagguggcaaaguguca

SEQ ID NO: 5358 - RNA, 21 nt, Artificial Sequence
  SAMD9 targeting guide sequence portion
ucaaaagaggaagacuucuau

SEQ ID NO: 5359 - RNA, 21 nt, Artificial Sequence
  SAMD9 targeting guide sequence portion
ucaagguggcaaagugucaug

SEQ ID NO: 5360 - RNA, 21 nt, Artificial Sequence
  SAMD9 targeting guide sequence portion
uccaccaugacacuuugccac

SEQ ID NO: 5361 - RNA, 21 nt, Artificial Sequence
  SAMD9 targeting guide sequence portion
ucuaucaagguggcaaagugu

SEQ ID NO: 5362 - RNA, 21 nt, Artificial Sequence
  SAMD9 targeting guide sequence portion
ugacacuuugccaccuugaua

SEQ ID NO: 5363 - RNA, 21 nt, Artificial Sequence
  SAMD9 targeting guide sequence portion
ugauagaagucuuccucuuuu

SEQ ID NO: 5364 - RNA, 21 nt, Artificial Sequence
  SAMD9 targeting guide sequence portion
ugccaccuugauagaagucuu

SEQ ID NO: 5365 - RNA, 21 nt, Artificial Sequence
  SAMD9 targeting guide sequence portion
uuccaccaugacacuuugcca

SEQ ID NO: 5366 - RNA, 21 nt, Artificial Sequence
  SAMD9 targeting guide sequence portion
uucuaucaagguggcaaagug

SEQ ID NO: 5367 - RNA, 21 nt, Artificial Sequence
  SAMD9 targeting guide sequence portion
uugauagaagucuuccucuuu

SEQ ID NO: 5368 - RNA, 21 nt, Artificial Sequence
  SAMD9 targeting guide sequence portion
uugccaccuugauagaagucu

SEQ ID NO: 5369 - RNA, 21 nt, Artificial Sequence
  SAMD9 targeting guide sequence portion
uuugccaccuugauagaaguc

SEQ ID NO: 5370 - RNA, 22 nt, Artificial Sequence
  SAMD9 targeting guide sequence portion
aaaagaggaagacuucuaucaa

SEQ ID NO: 5371 - RNA, 22 nt, Artificial Sequence
  SAMD9 targeting guide sequence portion
aaagaggaagacuucuaucaag

SEQ ID NO: 5372 - RNA, 22 nt, Artificial Sequence
  SAMD9 targeting guide sequence portion
aagacuucuaucaagguggcaa

SEQ ID NO: 5373 - RNA, 22 nt, Artificial Sequence
  SAMD9 targeting guide sequence portion
aagaggaagacuucuaucaagg

SEQ ID NO: 5374 - RNA, 22 nt, Artificial Sequence
  SAMD9 targeting guide sequence portion
aagguggcaaagugucauggug

SEQ ID NO: 5375 - RNA, 22 nt, Artificial Sequence
  SAMD9 targeting guide sequence portion
aaguuccaccaugacacuuugc

SEQ ID NO: 5376 - RNA, 22 nt, Artificial Sequence
  SAMD9 targeting guide sequence portion
acacuuugccaccuugauagaa

SEQ ID NO: 5377 - RNA, 22 nt, Artificial Sequence
  SAMD9 targeting guide sequence portion
accaugacacuuugccaccuug

SEQ ID NO: 5378 - RNA, 22 nt, Artificial Sequence
  SAMD9 targeting guide sequence portion
accuugauagaagucuuccucu

SEQ ID NO: 5379 - RNA, 22 nt, Artificial Sequence
  SAMD9 targeting guide sequence portion
acuucuaucaagguggcaaagu

SEQ ID NO: 5380 - RNA, 22 nt, Artificial Sequence
  SAMD9 targeting guide sequence portion
acuuugccaccuugauagaagu

SEQ ID NO: 5381 - RNA, 22 nt, Artificial Sequence
  SAMD9 targeting guide sequence portion
agacuucuaucaagguggcaaa

SEQ ID NO: 5382 - RNA, 22 nt, Artificial Sequence
  SAMD9 targeting guide sequence portion
agaggaagacuucuaucaaggu

SEQ ID NO: 5383 - RNA, 22 nt, Artificial Sequence
  SAMD9 targeting guide sequence portion
aggaagacuucuaucaaggugg

SEQ ID NO: 5384 - RNA, 22 nt, Artificial Sequence
  SAMD9 targeting guide sequence portion
aggcaucaaaagaggaagacuu

SEQ ID NO: 5385 - RNA, 22 nt, Artificial Sequence
  SAMD9 targeting guide sequence portion
aguuccaccaugacacuuugcc

SEQ ID NO: 5386 - RNA, 22 nt, Artificial Sequence
  SAMD9 targeting guide sequence portion
aucaaaagaggaagacuucuau

SEQ ID NO: 5387 - RNA, 22 nt, Artificial Sequence
  SAMD9 targeting guide sequence portion
aucaagguggcaaagugucaug

SEQ ID NO: 5388 - RNA, 22 nt, Artificial Sequence
  SAMD9 targeting guide sequence portion
augacacuuugccaccuugaua

SEQ ID NO: 5389 - RNA, 22 nt, Artificial Sequence
  SAMD9 targeting guide sequence portion
caaaagaggaagacuucuauca

SEQ ID NO: 5390 - RNA, 22 nt, Artificial Sequence
  SAMD9 targeting guide sequence portion
caagguggcaaagugucauggu

SEQ ID NO: 5391 - RNA, 22 nt, Artificial Sequence
  SAMD9 targeting guide sequence portion
caccaugacacuuugccaccuu

SEQ ID NO: 5392 - RNA, 22 nt, Artificial Sequence
  SAMD9 targeting guide sequence portion
caccuugauagaagucuuccuc

SEQ ID NO: 5393 - RNA, 22 nt, Artificial Sequence
  SAMD9 targeting guide sequence portion
cacuuugccaccuugauagaag

SEQ ID NO: 5394 - RNA, 22 nt, Artificial Sequence
  SAMD9 targeting guide sequence portion
caucaaaagaggaagacuucua

SEQ ID NO: 5395 - RNA, 22 nt, Artificial Sequence
  SAMD9 targeting guide sequence portion
caugacacuuugccaccuugau

SEQ ID NO: 5396 - RNA, 22 nt, Artificial Sequence
  SAMD9 targeting guide sequence portion
ccaccaugacacuuugccaccu

SEQ ID NO: 5397 - RNA, 22 nt, Artificial Sequence
  SAMD9 targeting guide sequence portion
ccaccuugauagaagucuuccu

SEQ ID NO: 5398 - RNA, 22 nt, Artificial Sequence
  SAMD9 targeting guide sequence portion
ccaugacacuuugccaccuuga

SEQ ID NO: 5399 - RNA, 22 nt, Artificial Sequence
  SAMD9 targeting guide sequence portion
ccuugauagaagucuuccucuu

SEQ ID NO: 5400 - RNA, 22 nt, Artificial Sequence
  SAMD9 targeting guide sequence portion
cuaucaagguggcaaaguguca

SEQ ID NO: 5401 - RNA, 22 nt, Artificial Sequence
  SAMD9 targeting guide sequence portion
cuucuaucaagguggcaaagug

SEQ ID NO: 5402 - RNA, 22 nt, Artificial Sequence
  SAMD9 targeting guide sequence portion
cuugauagaagucuuccucuuu

SEQ ID NO: 5403 - RNA, 22 nt, Artificial Sequence
  SAMD9 targeting guide sequence portion
cuuugccaccuugauagaaguc

SEQ ID NO: 5404 - RNA, 22 nt, Artificial Sequence
  SAMD9 targeting guide sequence portion
gaagacuucuaucaagguggca

SEQ ID NO: 5405 - RNA, 22 nt, Artificial Sequence
  SAMD9 targeting guide sequence portion
gacacuuugccaccuugauaga

SEQ ID NO: 5406 - RNA, 22 nt, Artificial Sequence
  SAMD9 targeting guide sequence portion
gacuucuaucaagguggcaaag

SEQ ID NO: 5407 - RNA, 22 nt, Artificial Sequence
  SAMD9 targeting guide sequence portion
gaggaagacuucuaucaaggug

SEQ ID NO: 5408 - RNA, 22 nt, Artificial Sequence
  SAMD9 targeting guide sequence portion
gcaucaaaagaggaagacuucu

SEQ ID NO: 5409 - RNA, 22 nt, Artificial Sequence
  SAMD9 targeting guide sequence portion
gccaccuugauagaagucuucc

SEQ ID NO: 5410 - RNA, 22 nt, Artificial Sequence
  SAMD9 targeting guide sequence portion
ggaagacuucuaucaagguggc

SEQ ID NO: 5411 - RNA, 22 nt, Artificial Sequence
  SAMD9 targeting guide sequence portion
ggcaucaaaagaggaagacuuc

SEQ ID NO: 5412 - RNA, 22 nt, Artificial Sequence
  SAMD9 targeting guide sequence portion
guuccaccaugacacuuugcca

SEQ ID NO: 5413 - RNA, 22 nt, Artificial Sequence
  SAMD9 targeting guide sequence portion
uaucaagguggcaaagugucau

SEQ ID NO: 5414 - RNA, 22 nt, Artificial Sequence
  SAMD9 targeting guide sequence portion
ucaaaagaggaagacuucuauc

SEQ ID NO: 5415 - RNA, 22 nt, Artificial Sequence
  SAMD9 targeting guide sequence portion
ucaagguggcaaagugucaugg

SEQ ID NO: 5416 - RNA, 22 nt, Artificial Sequence
  SAMD9 targeting guide sequence portion
uccaccaugacacuuugccacc

SEQ ID NO: 5417 - RNA, 22 nt, Artificial Sequence
  SAMD9 targeting guide sequence portion
ucuaucaagguggcaaaguguc

SEQ ID NO: 5418 - RNA, 22 nt, Artificial Sequence
  SAMD9 targeting guide sequence portion
ugacacuuugccaccuugauag

SEQ ID NO: 5419 - RNA, 22 nt, Artificial Sequence
  SAMD9 targeting guide sequence portion
ugauagaagucuuccucuuuug

SEQ ID NO: 5420 - RNA, 22 nt, Artificial Sequence
  SAMD9 targeting guide sequence portion
ugccaccuugauagaagucuuc

SEQ ID NO: 5421 - RNA, 22 nt, Artificial Sequence
  SAMD9 targeting guide sequence portion
uuccaccaugacacuuugccac

SEQ ID NO: 5422 - RNA, 22 nt, Artificial Sequence
  SAMD9 targeting guide sequence portion
uucuaucaagguggcaaagugu

SEQ ID NO: 5423 - RNA, 22 nt, Artificial Sequence
  SAMD9 targeting guide sequence portion
uugauagaagucuuccucuuuu

SEQ ID NO: 5424 - RNA, 22 nt, Artificial Sequence
  SAMD9 targeting guide sequence portion
uugccaccuugauagaagucuu

SEQ ID NO: 5425 - RNA, 22 nt, Artificial Sequence
  SAMD9 targeting guide sequence portion
uuugccaccuugauagaagucu

SEQ ID NO: 5426 - RNA, 20 nt, Artificial Sequence
  SAMD9 targeting guide sequence portion
acugucccucugaaaaagga

SEQ ID NO: 5427 - RNA, 20 nt, Artificial Sequence
  SAMD9 targeting guide sequence portion
agagggacagucgauaaacc

SEQ ID NO: 5428 - RNA, 20 nt, Artificial Sequence
  SAMD9 targeting guide sequence portion
agggacagucgauaaaccaa

SEQ ID NO: 5429 - RNA, 20 nt, Artificial Sequence
  SAMD9 targeting guide sequence portion
auaucuucuuccuuuuucag

SEQ ID NO: 5430 - RNA, 20 nt, Artificial Sequence
  SAMD9 targeting guide sequence portion
aucgacugucccucugaaaa

SEQ ID NO: 5431 - RNA, 20 nt, Artificial Sequence
  SAMD9 targeting guide sequence portion
aucuauugguuuaucgacug

SEQ ID NO: 5432 - RNA, 20 nt, Artificial Sequence
  SAMD9 targeting guide sequence portion
aucuucuuccuuuuucagag

SEQ ID NO: 5433 - RNA, 20 nt, Artificial Sequence
  SAMD9 targeting guide sequence portion
augauaucuucuuccuuuuu

SEQ ID NO: 5434 - RNA, 20 nt, Artificial Sequence
  SAMD9 targeting guide sequence portion
auugguuuaucgacuguccc

SEQ ID NO: 5435 - RNA, 20 nt, Artificial Sequence
  SAMD9 targeting guide sequence portion
cagagggacagucgauaaac

SEQ ID NO: 5436 - RNA, 20 nt, Artificial Sequence
  SAMD9 targeting guide sequence portion
caucuauugguuuaucgacu

SEQ ID NO: 5437 - RNA, 20 nt, Artificial Sequence
  SAMD9 targeting guide sequence portion
caugauaucuucuuccuuuu

SEQ ID NO: 5438 - RNA, 20 nt, Artificial Sequence
  SAMD9 targeting guide sequence portion
ccaucuauugguuuaucgac

SEQ ID NO: 5439 - RNA, 20 nt, Artificial Sequence
  SAMD9 targeting guide sequence portion
cccucugaaaaaggaagaag

SEQ ID NO: 5440 - RNA, 20 nt, Artificial Sequence
  SAMD9 targeting guide sequence portion
ccucugaaaaaggaagaaga

SEQ ID NO: 5441 - RNA, 20 nt, Artificial Sequence
  SAMD9 targeting guide sequence portion
ccuuuuucagagggacaguc

SEQ ID NO: 5442 - RNA, 20 nt, Artificial Sequence
  SAMD9 targeting guide sequence portion
cgacugucccucugaaaaag

SEQ ID NO: 5443 - RNA, 20 nt, Artificial Sequence
  SAMD9 targeting guide sequence portion
cuauugguuuaucgacuguc

SEQ ID NO: 5444 - RNA, 20 nt, Artificial Sequence
  SAMD9 targeting guide sequence portion
cucugaaaaaggaagaagau

SEQ ID NO: 5445 - RNA, 20 nt, Artificial Sequence
  SAMD9 targeting guide sequence portion
cugucccucugaaaaaggaa

SEQ ID NO: 5446 - RNA, 20 nt, Artificial Sequence
  SAMD9 targeting guide sequence portion
cuuccuuuuucagagggaca

SEQ ID NO: 5447 - RNA, 20 nt, Artificial Sequence
  SAMD9 targeting guide sequence portion
cuucuuccuuuuucagaggg

SEQ ID NO: 5448 - RNA, 20 nt, Artificial Sequence
  SAMD9 targeting guide sequence portion
cuuuuucagagggacagucg

SEQ ID NO: 5449 - RNA, 20 nt, Artificial Sequence
  SAMD9 targeting guide sequence portion
gacugucccucugaaaaagg

SEQ ID NO: 5450 - RNA, 20 nt, Artificial Sequence
  SAMD9 targeting guide sequence portion
gagggacagucgauaaacca

SEQ ID NO: 5451 - RNA, 20 nt, Artificial Sequence
  SAMD9 targeting guide sequence portion
gauaucuucuuccuuuuuca

SEQ ID NO: 5452 - RNA, 20 nt, Artificial Sequence
  SAMD9 targeting guide sequence portion
gggacagucgauaaaccaau

SEQ ID NO: 5453 - RNA, 20 nt, Artificial Sequence
  SAMD9 targeting guide sequence portion
gguuuaucgacugucccucu

SEQ ID NO: 5454 - RNA, 20 nt, Artificial Sequence
  SAMD9 targeting guide sequence portion
gucccucugaaaaaggaaga

SEQ ID NO: 5455 - RNA, 20 nt, Artificial Sequence
  SAMD9 targeting guide sequence portion
guuuaucgacugucccucug

SEQ ID NO: 5456 - RNA, 20 nt, Artificial Sequence
  SAMD9 targeting guide sequence portion
uaucgacugucccucugaaa

SEQ ID NO: 5457 - RNA, 20 nt, Artificial Sequence
  SAMD9 targeting guide sequence portion
uaucuucuuccuuuuucaga

SEQ ID NO: 5458 - RNA, 20 nt, Artificial Sequence
  SAMD9 targeting guide sequence portion
uauugguuuaucgacugucc

SEQ ID NO: 5459 - RNA, 20 nt, Artificial Sequence
  SAMD9 targeting guide sequence portion
ucagagggacagucgauaaa

SEQ ID NO: 5460 - RNA, 20 nt, Artificial Sequence
  SAMD9 targeting guide sequence portion
ucccucugaaaaaggaagaa

SEQ ID NO: 5461 - RNA, 20 nt, Artificial Sequence
  SAMD9 targeting guide sequence portion
uccuuuuucagagggacagu

SEQ ID NO: 5462 - RNA, 20 nt, Artificial Sequence
  SAMD9 targeting guide sequence portion
ucgacugucccucugaaaaa

SEQ ID NO: 5463 - RNA, 20 nt, Artificial Sequence
  SAMD9 targeting guide sequence portion
ucuauugguuuaucgacugu

SEQ ID NO: 5464 - RNA, 20 nt, Artificial Sequence
  SAMD9 targeting guide sequence portion
ucuuccuuuuucagagggac

SEQ ID NO: 5465 - RNA, 20 nt, Artificial Sequence
  SAMD9 targeting guide sequence portion
ucuucuuccuuuuucagagg

SEQ ID NO: 5466 - RNA, 20 nt, Artificial Sequence
  SAMD9 targeting guide sequence portion
ugauaucuucuuccuuuuuc

SEQ ID NO: 5467 - RNA, 20 nt, Artificial Sequence
  SAMD9 targeting guide sequence portion
ugguuuaucgacugucccuc

SEQ ID NO: 5468 - RNA, 20 nt, Artificial Sequence
  SAMD9 targeting guide sequence portion
ugucccucugaaaaaggaag

SEQ ID NO: 5469 - RNA, 20 nt, Artificial Sequence
  SAMD9 targeting guide sequence portion
uuaucgacugucccucugaa

SEQ ID NO: 5470 - RNA, 20 nt, Artificial Sequence
  SAMD9 targeting guide sequence portion
uucagagggacagucgauaa

SEQ ID NO: 5471 - RNA, 20 nt, Artificial Sequence
  SAMD9 targeting guide sequence portion
uuccuuuuucagagggacag

SEQ ID NO: 5472 - RNA, 20 nt, Artificial Sequence
  SAMD9 targeting guide sequence portion
uucuuccuuuuucagaggga

SEQ ID NO: 5473 - RNA, 20 nt, Artificial Sequence
  SAMD9 targeting guide sequence portion
uugguuuaucgacugucccu

SEQ ID NO: 5474 - RNA, 20 nt, Artificial Sequence
  SAMD9 targeting guide sequence portion
uuuaucgacugucccucuga

SEQ ID NO: 5475 - RNA, 20 nt, Artificial Sequence
  SAMD9 targeting guide sequence portion
uuucagagggacagucgaua

SEQ ID NO: 5476 - RNA, 20 nt, Artificial Sequence
  SAMD9 targeting guide sequence portion
uuuucagagggacagucgau

SEQ ID NO: 5477 - RNA, 20 nt, Artificial Sequence
  SAMD9 targeting guide sequence portion
uuuuucagagggacagucga

SEQ ID NO: 5478 - RNA, 21 nt, Artificial Sequence
  SAMD9 targeting guide sequence portion
acugucccucugaaaaaggaa

SEQ ID NO: 5479 - RNA, 21 nt, Artificial Sequence
  SAMD9 targeting guide sequence portion
agagggacagucgauaaacca

SEQ ID NO: 5480 - RNA, 21 nt, Artificial Sequence
  SAMD9 targeting guide sequence portion
agggacagucgauaaaccaau

SEQ ID NO: 5481 - RNA, 21 nt, Artificial Sequence
  SAMD9 targeting guide sequence portion
auaucuucuuccuuuuucaga

SEQ ID NO: 5482 - RNA, 21 nt, Artificial Sequence
  SAMD9 targeting guide sequence portion
aucgacugucccucugaaaaa

SEQ ID NO: 5483 - RNA, 21 nt, Artificial Sequence
  SAMD9 targeting guide sequence portion
aucuauugguuuaucgacugu

SEQ ID NO: 5484 - RNA, 21 nt, Artificial Sequence
  SAMD9 targeting guide sequence portion
aucuucuuccuuuuucagagg

SEQ ID NO: 5485 - RNA, 21 nt, Artificial Sequence
  SAMD9 targeting guide sequence portion
augauaucuucuuccuuuuuc

SEQ ID NO: 5486 - RNA, 21 nt, Artificial Sequence
  SAMD9 targeting guide sequence portion
auugguuuaucgacugucccu

SEQ ID NO: 5487 - RNA, 21 nt, Artificial Sequence
  SAMD9 targeting guide sequence portion
cagagggacagucgauaaacc

SEQ ID NO: 5488 - RNA, 21 nt, Artificial Sequence
  SAMD9 targeting guide sequence portion
caucuauugguuuaucgacug

SEQ ID NO: 5489 - RNA, 21 nt, Artificial Sequence
  SAMD9 targeting guide sequence portion
caugauaucuucuuccuuuuu

SEQ ID NO: 5490 - RNA, 21 nt, Artificial Sequence
  SAMD9 targeting guide sequence portion
ccaucuauugguuuaucgacu

SEQ ID NO: 5491 - RNA, 21 nt, Artificial Sequence
  SAMD9 targeting guide sequence portion
cccucugaaaaaggaagaaga

SEQ ID NO: 5492 - RNA, 21 nt, Artificial Sequence
  SAMD9 targeting guide sequence portion
ccucugaaaaaggaagaagau

SEQ ID NO: 5493 - RNA, 21 nt, Artificial Sequence
  SAMD9 targeting guide sequence portion
ccuuuuucagagggacagucg

SEQ ID NO: 5494 - RNA, 21 nt, Artificial Sequence
  SAMD9 targeting guide sequence portion
cgacugucccucugaaaaagg

SEQ ID NO: 5495 - RNA, 21 nt, Artificial Sequence
  SAMD9 targeting guide sequence portion
cuauugguuuaucgacugucc

SEQ ID NO: 5496 - RNA, 21 nt, Artificial Sequence
  SAMD9 targeting guide sequence portion
cucugaaaaaggaagaagaua

SEQ ID NO: 5497 - RNA, 21 nt, Artificial Sequence
  SAMD9 targeting guide sequence portion
cugucccucugaaaaaggaag

SEQ ID NO: 5498 - RNA, 21 nt, Artificial Sequence
  SAMD9 targeting guide sequence portion
cuuccuuuuucagagggacag

SEQ ID NO: 5499 - RNA, 21 nt, Artificial Sequence
  SAMD9 targeting guide sequence portion
cuucuuccuuuuucagaggga

SEQ ID NO: 5500 - RNA, 21 nt, Artificial Sequence
  SAMD9 targeting guide sequence portion
cuuuuucagagggacagucga

SEQ ID NO: 5501 - RNA, 21 nt, Artificial Sequence
  SAMD9 targeting guide sequence portion
gacugucccucugaaaaagga

SEQ ID NO: 5502 - RNA, 21 nt, Artificial Sequence
  SAMD9 targeting guide sequence portion
gagggacagucgauaaaccaa

SEQ ID NO: 5503 - RNA, 21 nt, Artificial Sequence
  SAMD9 targeting guide sequence portion
gauaucuucuuccuuuuucag

SEQ ID NO: 5504 - RNA, 21 nt, Artificial Sequence
  SAMD9 targeting guide sequence portion
gccaucuauugguuuaucgac

SEQ ID NO: 5505 - RNA, 21 nt, Artificial Sequence
  SAMD9 targeting guide sequence portion
gggacagucgauaaaccaaua

SEQ ID NO: 5506 - RNA, 21 nt, Artificial Sequence
  SAMD9 targeting guide sequence portion
gguuuaucgacugucccucug

SEQ ID NO: 5507 - RNA, 21 nt, Artificial Sequence
  SAMD9 targeting guide sequence portion
gucccucugaaaaaggaagaa

SEQ ID NO: 5508 - RNA, 21 nt, Artificial Sequence
  SAMD9 targeting guide sequence portion
guuuaucgacugucccucuga

SEQ ID NO: 5509 - RNA, 21 nt, Artificial Sequence
  SAMD9 targeting guide sequence portion
uaucgacugucccucugaaaa

SEQ ID NO: 5510 - RNA, 21 nt, Artificial Sequence
  SAMD9 targeting guide sequence portion
uaucuucuuccuuuuucagag

SEQ ID NO: 5511 - RNA, 21 nt, Artificial Sequence
  SAMD9 targeting guide sequence portion
uauugguuuaucgacuguccc

SEQ ID NO: 5512 - RNA, 21 nt, Artificial Sequence
  SAMD9 targeting guide sequence portion
ucagagggacagucgauaaac

SEQ ID NO: 5513 - RNA, 21 nt, Artificial Sequence
  SAMD9 targeting guide sequence portion
ucaugauaucuucuuccuuuu

SEQ ID NO: 5514 - RNA, 21 nt, Artificial Sequence
  SAMD9 targeting guide sequence portion
ucccucugaaaaaggaagaag

SEQ ID NO: 5515 - RNA, 21 nt, Artificial Sequence
  SAMD9 targeting guide sequence portion
uccuuuuucagagggacaguc

SEQ ID NO: 5516 - RNA, 21 nt, Artificial Sequence
  SAMD9 targeting guide sequence portion
ucgacugucccucugaaaaag

SEQ ID NO: 5517 - RNA, 21 nt, Artificial Sequence
  SAMD9 targeting guide sequence portion
ucuauugguuuaucgacuguc

SEQ ID NO: 5518 - RNA, 21 nt, Artificial Sequence
  SAMD9 targeting guide sequence portion
ucuuccuuuuucagagggaca

SEQ ID NO: 5519 - RNA, 21 nt, Artificial Sequence
  SAMD9 targeting guide sequence portion
ucuucuuccuuuuucagaggg

SEQ ID NO: 5520 - RNA, 21 nt, Artificial Sequence
  SAMD9 targeting guide sequence portion
ugauaucuucuuccuuuuuca

SEQ ID NO: 5521 - RNA, 21 nt, Artificial Sequence
  SAMD9 targeting guide sequence portion
ugguuuaucgacugucccucu

SEQ ID NO: 5522 - RNA, 21 nt, Artificial Sequence
  SAMD9 targeting guide sequence portion
ugucccucugaaaaaggaaga

SEQ ID NO: 5523 - RNA, 21 nt, Artificial Sequence
  SAMD9 targeting guide sequence portion
uuaucgacugucccucugaaa

SEQ ID NO: 5524 - RNA, 21 nt, Artificial Sequence
  SAMD9 targeting guide sequence portion
uucagagggacagucgauaaa

SEQ ID NO: 5525 - RNA, 21 nt, Artificial Sequence
  SAMD9 targeting guide sequence portion
uuccuuuuucagagggacagu

SEQ ID NO: 5526 - RNA, 21 nt, Artificial Sequence
  SAMD9 targeting guide sequence portion
uucuuccuuuuucagagggac

SEQ ID NO: 5527 - RNA, 21 nt, Artificial Sequence
  SAMD9 targeting guide sequence portion
uugguuuaucgacugucccuc

SEQ ID NO: 5528 - RNA, 21 nt, Artificial Sequence
  SAMD9 targeting guide sequence portion
uuuaucgacugucccucugaa

SEQ ID NO: 5529 - RNA, 21 nt, Artificial Sequence
  SAMD9 targeting guide sequence portion
uuucagagggacagucgauaa

SEQ ID NO: 5530 - RNA, 21 nt, Artificial Sequence
  SAMD9 targeting guide sequence portion
uuuucagagggacagucgaua

SEQ ID NO: 5531 - RNA, 21 nt, Artificial Sequence
  SAMD9 targeting guide sequence portion
uuuuucagagggacagucgau

SEQ ID NO: 5532 - RNA, 22 nt, Artificial Sequence
  SAMD9 targeting guide sequence portion
acugucccucugaaaaaggaag

SEQ ID NO: 5533 - RNA, 22 nt, Artificial Sequence
  SAMD9 targeting guide sequence portion
agagggacagucgauaaaccaa

SEQ ID NO: 5534 - RNA, 22 nt, Artificial Sequence
  SAMD9 targeting guide sequence portion
agggacagucgauaaaccaaua

SEQ ID NO: 5535 - RNA, 22 nt, Artificial Sequence
  SAMD9 targeting guide sequence portion
auaucuucuuccuuuuucagag

SEQ ID NO: 5536 - RNA, 22 nt, Artificial Sequence
  SAMD9 targeting guide sequence portion
aucgacugucccucugaaaaag

SEQ ID NO: 5537 - RNA, 22 nt, Artificial Sequence
  SAMD9 targeting guide sequence portion
aucuauugguuuaucgacuguc

SEQ ID NO: 5538 - RNA, 22 nt, Artificial Sequence
  SAMD9 targeting guide sequence portion
aucuucuuccuuuuucagaggg

SEQ ID NO: 5539 - RNA, 22 nt, Artificial Sequence
  SAMD9 targeting guide sequence portion
augauaucuucuuccuuuuuca

SEQ ID NO: 5540 - RNA, 22 nt, Artificial Sequence
  SAMD9 targeting guide sequence portion
auugguuuaucgacugucccuc

SEQ ID NO: 5541 - RNA, 22 nt, Artificial Sequence
  SAMD9 targeting guide sequence portion
cagagggacagucgauaaacca

SEQ ID NO: 5542 - RNA, 22 nt, Artificial Sequence
  SAMD9 targeting guide sequence portion
caucuauugguuuaucgacugu

SEQ ID NO: 5543 - RNA, 22 nt, Artificial Sequence
  SAMD9 targeting guide sequence portion
caugauaucuucuuccuuuuuc

SEQ ID NO: 5544 - RNA, 22 nt, Artificial Sequence
  SAMD9 targeting guide sequence portion
ccaucuauugguuuaucgacug

SEQ ID NO: 5545 - RNA, 22 nt, Artificial Sequence
  SAMD9 targeting guide sequence portion
cccucugaaaaaggaagaagau

SEQ ID NO: 5546 - RNA, 22 nt, Artificial Sequence
  SAMD9 targeting guide sequence portion
ccucugaaaaaggaagaagaua

SEQ ID NO: 5547 - RNA, 22 nt, Artificial Sequence
  SAMD9 targeting guide sequence portion
ccuuuuucagagggacagucga

SEQ ID NO: 5548 - RNA, 22 nt, Artificial Sequence
  SAMD9 targeting guide sequence portion
cgacugucccucugaaaaagga

SEQ ID NO: 5549 - RNA, 22 nt, Artificial Sequence
  SAMD9 targeting guide sequence portion
cuauugguuuaucgacuguccc

SEQ ID NO: 5550 - RNA, 22 nt, Artificial Sequence
  SAMD9 targeting guide sequence portion
cucugaaaaaggaagaagauau

SEQ ID NO: 5551 - RNA, 22 nt, Artificial Sequence
  SAMD9 targeting guide sequence portion
cugucccucugaaaaaggaaga

SEQ ID NO: 5552 - RNA, 22 nt, Artificial Sequence
  SAMD9 targeting guide sequence portion
cuuccuuuuucagagggacagu

SEQ ID NO: 5553 - RNA, 22 nt, Artificial Sequence
  SAMD9 targeting guide sequence portion
cuucuuccuuuuucagagggac

SEQ ID NO: 5554 - RNA, 22 nt, Artificial Sequence
  SAMD9 targeting guide sequence portion
cuuuuucagagggacagucgau

SEQ ID NO: 5555 - RNA, 22 nt, Artificial Sequence
  SAMD9 targeting guide sequence portion
gacugucccucugaaaaaggaa

SEQ ID NO: 5556 - RNA, 22 nt, Artificial Sequence
  SAMD9 targeting guide sequence portion
gagggacagucgauaaaccaau

SEQ ID NO: 5557 - RNA, 22 nt, Artificial Sequence
  SAMD9 targeting guide sequence portion
gauaucuucuuccuuuuucaga

SEQ ID NO: 5558 - RNA, 22 nt, Artificial Sequence
  SAMD9 targeting guide sequence portion
gccaucuauugguuuaucgacu

SEQ ID NO: 5559 - RNA, 22 nt, Artificial Sequence
  SAMD9 targeting guide sequence portion
gggacagucgauaaaccaauag

SEQ ID NO: 5560 - RNA, 22 nt, Artificial Sequence
  SAMD9 targeting guide sequence portion
gguuuaucgacugucccucuga

SEQ ID NO: 5561 - RNA, 22 nt, Artificial Sequence
  SAMD9 targeting guide sequence portion
gucaugauaucuucuuccuuuu

SEQ ID NO: 5562 - RNA, 22 nt, Artificial Sequence
  SAMD9 targeting guide sequence portion
gucccucugaaaaaggaagaag

SEQ ID NO: 5563 - RNA, 22 nt, Artificial Sequence
  SAMD9 targeting guide sequence portion
guuuaucgacugucccucugaa

SEQ ID NO: 5564 - RNA, 22 nt, Artificial Sequence
  SAMD9 targeting guide sequence portion
uaucgacugucccucugaaaaa

SEQ ID NO: 5565 - RNA, 22 nt, Artificial Sequence
  SAMD9 targeting guide sequence portion
uaucuucuuccuuuuucagagg

SEQ ID NO: 5566 - RNA, 22 nt, Artificial Sequence
  SAMD9 targeting guide sequence portion
uauugguuuaucgacugucccu

SEQ ID NO: 5567 - RNA, 22 nt, Artificial Sequence
  SAMD9 targeting guide sequence portion
ucagagggacagucgauaaacc

SEQ ID NO: 5568 - RNA, 22 nt, Artificial Sequence
  SAMD9 targeting guide sequence portion
ucaugauaucuucuuccuuuuu

SEQ ID NO: 5569 - RNA, 22 nt, Artificial Sequence
  SAMD9 targeting guide sequence portion
ucccucugaaaaaggaagaaga

SEQ ID NO: 5570 - RNA, 22 nt, Artificial Sequence
  SAMD9 targeting guide sequence portion
uccuuuuucagagggacagucg

SEQ ID NO: 5571 - RNA, 22 nt, Artificial Sequence
  SAMD9 targeting guide sequence portion
ucgacugucccucugaaaaagg

SEQ ID NO: 5572 - RNA, 22 nt, Artificial Sequence
  SAMD9 targeting guide sequence portion
ucuauugguuuaucgacugucc

SEQ ID NO: 5573 - RNA, 22 nt, Artificial Sequence
  SAMD9 targeting guide sequence portion
ucuuccuuuuucagagggacag

SEQ ID NO: 5574 - RNA, 22 nt, Artificial Sequence
  SAMD9 targeting guide sequence portion
ucuucuuccuuuuucagaggga

SEQ ID NO: 5575 - RNA, 22 nt, Artificial Sequence
  SAMD9 targeting guide sequence portion
ugauaucuucuuccuuuuucag

SEQ ID NO: 5576 - RNA, 22 nt, Artificial Sequence
  SAMD9 targeting guide sequence portion
ugccaucuauugguuuaucgac

SEQ ID NO: 5577 - RNA, 22 nt, Artificial Sequence
  SAMD9 targeting guide sequence portion
ugguuuaucgacugucccucug

SEQ ID NO: 5578 - RNA, 22 nt, Artificial Sequence
  SAMD9 targeting guide sequence portion
ugucccucugaaaaaggaagaa

SEQ ID NO: 5579 - RNA, 22 nt, Artificial Sequence
  SAMD9 targeting guide sequence portion
uuaucgacugucccucugaaaa

SEQ ID NO: 5580 - RNA, 22 nt, Artificial Sequence
  SAMD9 targeting guide sequence portion
uucagagggacagucgauaaac

SEQ ID NO: 5581 - RNA, 22 nt, Artificial Sequence
  SAMD9 targeting guide sequence portion
uuccuuuuucagagggacaguc

SEQ ID NO: 5582 - RNA, 22 nt, Artificial Sequence
  SAMD9 targeting guide sequence portion
uucuuccuuuuucagagggaca

SEQ ID NO: 5583 - RNA, 22 nt, Artificial Sequence
  SAMD9 targeting guide sequence portion
uugguuuaucgacugucccucu

SEQ ID NO: 5584 - RNA, 22 nt, Artificial Sequence
  SAMD9 targeting guide sequence portion
uuuaucgacugucccucugaaa

SEQ ID NO: 5585 - RNA, 22 nt, Artificial Sequence
  SAMD9 targeting guide sequence portion
uuucagagggacagucgauaaa

SEQ ID NO: 5586 - RNA, 22 nt, Artificial Sequence
  SAMD9 targeting guide sequence portion
uuuucagagggacagucgauaa

SEQ ID NO: 5587 - RNA, 22 nt, Artificial Sequence
  SAMD9 targeting guide sequence portion
uuuuucagagggacagucgaua

SEQ ID NO: 5588 - RNA, 20 nt, Artificial Sequence
  SAMD9 targeting guide sequence portion
aaaacaccaagaugauuuca

SEQ ID NO: 5589 - RNA, 20 nt, Artificial Sequence
  SAMD9 targeting guide sequence portion
aaacaccaagaugauuucaa

SEQ ID NO: 5590 - RNA, 20 nt, Artificial Sequence
  SAMD9 targeting guide sequence portion
aaauacauuggcuugaaauc

SEQ ID NO: 5591 - RNA, 20 nt, Artificial Sequence
  SAMD9 targeting guide sequence portion
aaaucaucuugguguuuuau

SEQ ID NO: 5592 - RNA, 20 nt, Artificial Sequence
  SAMD9 targeting guide sequence portion
aacaccaagaugauuucaag

SEQ ID NO: 5593 - RNA, 20 nt, Artificial Sequence
  SAMD9 targeting guide sequence portion
aagaugauuucaagccaaug

SEQ ID NO: 5594 - RNA, 20 nt, Artificial Sequence
  SAMD9 targeting guide sequence portion
aagauuaauaaaacaccaag

SEQ ID NO: 5595 - RNA, 20 nt, Artificial Sequence
  SAMD9 targeting guide sequence portion
aagcagaaauacauuggcuu

SEQ ID NO: 5596 - RNA, 20 nt, Artificial Sequence
  SAMD9 targeting guide sequence portion
aauaaaacaccaagaugauu

SEQ ID NO: 5597 - RNA, 20 nt, Artificial Sequence
  SAMD9 targeting guide sequence portion
aauacauuggcuugaaauca

SEQ ID NO: 5598 - RNA, 20 nt, Artificial Sequence
  SAMD9 targeting guide sequence portion
aaucaucuugguguuuuauu

SEQ ID NO: 5599 - RNA, 20 nt, Artificial Sequence
  SAMD9 targeting guide sequence portion
acaccaagaugauuucaagc

SEQ ID NO: 5600 - RNA, 20 nt, Artificial Sequence
  SAMD9 targeting guide sequence portion
acauuggcuugaaaucaucu

SEQ ID NO: 5601 - RNA, 20 nt, Artificial Sequence
  SAMD9 targeting guide sequence portion
accaagaugauuucaagcca

SEQ ID NO: 5602 - RNA, 20 nt, Artificial Sequence
  SAMD9 targeting guide sequence portion
agaaauacauuggcuugaaa

SEQ ID NO: 5603 - RNA, 20 nt, Artificial Sequence
  SAMD9 targeting guide sequence portion
agaugauuucaagccaaugu

SEQ ID NO: 5604 - RNA, 20 nt, Artificial Sequence
  SAMD9 targeting guide sequence portion
agauuaauaaaacaccaaga

SEQ ID NO: 5605 - RNA, 20 nt, Artificial Sequence
  SAMD9 targeting guide sequence portion
agcagaaauacauuggcuug

SEQ ID NO: 5606 - RNA, 20 nt, Artificial Sequence
  SAMD9 targeting guide sequence portion
auaaaacaccaagaugauuu

SEQ ID NO: 5607 - RNA, 20 nt, Artificial Sequence
  SAMD9 targeting guide sequence portion
auacauuggcuugaaaucau

SEQ ID NO: 5608 - RNA, 20 nt, Artificial Sequence
  SAMD9 targeting guide sequence portion
aucaucuugguguuuuauua

SEQ ID NO: 5609 - RNA, 20 nt, Artificial Sequence
  SAMD9 targeting guide sequence portion
augauuucaagccaauguau

SEQ ID NO: 5610 - RNA, 20 nt, Artificial Sequence
  SAMD9 targeting guide sequence portion
auuaauaaaacaccaagaug

SEQ ID NO: 5611 - RNA, 20 nt, Artificial Sequence
  SAMD9 targeting guide sequence portion
auuggcuugaaaucaucuug

SEQ ID NO: 5612 - RNA, 20 nt, Artificial Sequence
  SAMD9 targeting guide sequence portion
caagaugauuucaagccaau

SEQ ID NO: 5613 - RNA, 20 nt, Artificial Sequence
  SAMD9 targeting guide sequence portion
caagauuaauaaaacaccaa

SEQ ID NO: 5614 - RNA, 20 nt, Artificial Sequence
  SAMD9 targeting guide sequence portion
caccaagaugauuucaagcc

SEQ ID NO: 5615 - RNA, 20 nt, Artificial Sequence
  SAMD9 targeting guide sequence portion
cagaaauacauuggcuugaa

SEQ ID NO: 5616 - RNA, 20 nt, Artificial Sequence
  SAMD9 targeting guide sequence portion
cauuggcuugaaaucaucuu

SEQ ID NO: 5617 - RNA, 20 nt, Artificial Sequence
  SAMD9 targeting guide sequence portion
ccaagaugauuucaagccaa

SEQ ID NO: 5618 - RNA, 20 nt, Artificial Sequence
  SAMD9 targeting guide sequence portion
cuugaaaucaucuugguguu

SEQ ID NO: 5619 - RNA, 20 nt, Artificial Sequence
  SAMD9 targeting guide sequence portion
gaaauacauuggcuugaaau

SEQ ID NO: 5620 - RNA, 20 nt, Artificial Sequence
  SAMD9 targeting guide sequence portion
gaaaucaucuugguguuuua

SEQ ID NO: 5621 - RNA, 20 nt, Artificial Sequence
  SAMD9 targeting guide sequence portion
gaugauuucaagccaaugua

SEQ ID NO: 5622 - RNA, 20 nt, Artificial Sequence
  SAMD9 targeting guide sequence portion
gauuaauaaaacaccaagau

SEQ ID NO: 5623 - RNA, 20 nt, Artificial Sequence
  SAMD9 targeting guide sequence portion
gauuucaagccaauguauuu

SEQ ID NO: 5624 - RNA, 20 nt, Artificial Sequence
  SAMD9 targeting guide sequence portion
gcagaaauacauuggcuuga

SEQ ID NO: 5625 - RNA, 20 nt, Artificial Sequence
  SAMD9 targeting guide sequence portion
gcuugaaaucaucuuggugu

SEQ ID NO: 5626 - RNA, 20 nt, Artificial Sequence
  SAMD9 targeting guide sequence portion
ggcuugaaaucaucuuggug

SEQ ID NO: 5627 - RNA, 20 nt, Artificial Sequence
  SAMD9 targeting guide sequence portion
uaaaacaccaagaugauuuc

SEQ ID NO: 5628 - RNA, 20 nt, Artificial Sequence
  SAMD9 targeting guide sequence portion
uaauaaaacaccaagaugau

SEQ ID NO: 5629 - RNA, 20 nt, Artificial Sequence
  SAMD9 targeting guide sequence portion
uacauuggcuugaaaucauc

SEQ ID NO: 5630 - RNA, 20 nt, Artificial Sequence
  SAMD9 targeting guide sequence portion
ugaaaucaucuugguguuuu

SEQ ID NO: 5631 - RNA, 20 nt, Artificial Sequence
  SAMD9 targeting guide sequence portion
ugauuucaagccaauguauu

SEQ ID NO: 5632 - RNA, 20 nt, Artificial Sequence
  SAMD9 targeting guide sequence portion
uggcuugaaaucaucuuggu

SEQ ID NO: 5633 - RNA, 20 nt, Artificial Sequence
  SAMD9 targeting guide sequence portion
uuaauaaaacaccaagauga

SEQ ID NO: 5634 - RNA, 20 nt, Artificial Sequence
  SAMD9 targeting guide sequence portion
uugaaaucaucuugguguuu

SEQ ID NO: 5635 - RNA, 20 nt, Artificial Sequence
  SAMD9 targeting guide sequence portion
uuggcuugaaaucaucuugg

SEQ ID NO: 5636 - RNA, 21 nt, Artificial Sequence
  SAMD9 targeting guide sequence portion
aaaacaccaagaugauuucaa

SEQ ID NO: 5637 - RNA, 21 nt, Artificial Sequence
  SAMD9 targeting guide sequence portion
aaacaccaagaugauuucaag

SEQ ID NO: 5638 - RNA, 21 nt, Artificial Sequence
  SAMD9 targeting guide sequence portion
aaagcagaaauacauuggcuu

SEQ ID NO: 5639 - RNA, 21 nt, Artificial Sequence
  SAMD9 targeting guide sequence portion
aaauacauuggcuugaaauca

SEQ ID NO: 5640 - RNA, 21 nt, Artificial Sequence
  SAMD9 targeting guide sequence portion
aaaucaucuugguguuuuauu

SEQ ID NO: 5641 - RNA, 21 nt, Artificial Sequence
  SAMD9 targeting guide sequence portion
aacaccaagaugauuucaagc

SEQ ID NO: 5642 - RNA, 21 nt, Artificial Sequence
  SAMD9 targeting guide sequence portion
aagaugauuucaagccaaugu

SEQ ID NO: 5643 - RNA, 21 nt, Artificial Sequence
  SAMD9 targeting guide sequence portion
aagauuaauaaaacaccaaga

SEQ ID NO: 5644 - RNA, 21 nt, Artificial Sequence
  SAMD9 targeting guide sequence portion
aagcagaaauacauuggcuug

SEQ ID NO: 5645 - RNA, 21 nt, Artificial Sequence
  SAMD9 targeting guide sequence portion
aauaaaacaccaagaugauuu

SEQ ID NO: 5646 - RNA, 21 nt, Artificial Sequence
  SAMD9 targeting guide sequence portion
aauacauuggcuugaaaucau

SEQ ID NO: 5647 - RNA, 21 nt, Artificial Sequence
  SAMD9 targeting guide sequence portion
aaucaucuugguguuuuauua

SEQ ID NO: 5648 - RNA, 21 nt, Artificial Sequence
  SAMD9 targeting guide sequence portion
acaccaagaugauuucaagcc

SEQ ID NO: 5649 - RNA, 21 nt, Artificial Sequence
  SAMD9 targeting guide sequence portion
acauuggcuugaaaucaucuu

SEQ ID NO: 5650 - RNA, 21 nt, Artificial Sequence
  SAMD9 targeting guide sequence portion
accaagaugauuucaagccaa

SEQ ID NO: 5651 - RNA, 21 nt, Artificial Sequence
  SAMD9 targeting guide sequence portion
agaaauacauuggcuugaaau

SEQ ID NO: 5652 - RNA, 21 nt, Artificial Sequence
  SAMD9 targeting guide sequence portion
agaugauuucaagccaaugua

SEQ ID NO: 5653 - RNA, 21 nt, Artificial Sequence
  SAMD9 targeting guide sequence portion
agauuaauaaaacaccaagau

SEQ ID NO: 5654 - RNA, 21 nt, Artificial Sequence
  SAMD9 targeting guide sequence portion
agcagaaauacauuggcuuga

SEQ ID NO: 5655 - RNA, 21 nt, Artificial Sequence
  SAMD9 targeting guide sequence portion
auaaaacaccaagaugauuuc

SEQ ID NO: 5656 - RNA, 21 nt, Artificial Sequence
  SAMD9 targeting guide sequence portion
auacauuggcuugaaaucauc

SEQ ID NO: 5657 - RNA, 21 nt, Artificial Sequence
  SAMD9 targeting guide sequence portion
aucaucuugguguuuuauuaa

SEQ ID NO: 5658 - RNA, 21 nt, Artificial Sequence
  SAMD9 targeting guide sequence portion
augauuucaagccaauguauu

SEQ ID NO: 5659 - RNA, 21 nt, Artificial Sequence
  SAMD9 targeting guide sequence portion
auuaauaaaacaccaagauga

SEQ ID NO: 5660 - RNA, 21 nt, Artificial Sequence
  SAMD9 targeting guide sequence portion
auuggcuugaaaucaucuugg

SEQ ID NO: 5661 - RNA, 21 nt, Artificial Sequence
  SAMD9 targeting guide sequence portion
caagaugauuucaagccaaug

SEQ ID NO: 5662 - RNA, 21 nt, Artificial Sequence
  SAMD9 targeting guide sequence portion
caagauuaauaaaacaccaag

SEQ ID NO: 5663 - RNA, 21 nt, Artificial Sequence
  SAMD9 targeting guide sequence portion
caccaagaugauuucaagcca

SEQ ID NO: 5664 - RNA, 21 nt, Artificial Sequence
  SAMD9 targeting guide sequence portion
cagaaauacauuggcuugaaa

SEQ ID NO: 5665 - RNA, 21 nt, Artificial Sequence
  SAMD9 targeting guide sequence portion
cauuggcuugaaaucaucuug

SEQ ID NO: 5666 - RNA, 21 nt, Artificial Sequence
  SAMD9 targeting guide sequence portion
ccaagaugauuucaagccaau

SEQ ID NO: 5667 - RNA, 21 nt, Artificial Sequence
  SAMD9 targeting guide sequence portion
cuugaaaucaucuugguguuu

SEQ ID NO: 5668 - RNA, 21 nt, Artificial Sequence
  SAMD9 targeting guide sequence portion
gaaauacauuggcuugaaauc

SEQ ID NO: 5669 - RNA, 21 nt, Artificial Sequence
  SAMD9 targeting guide sequence portion
gaaaucaucuugguguuuuau

SEQ ID NO: 5670 - RNA, 21 nt, Artificial Sequence
  SAMD9 targeting guide sequence portion
gaugauuucaagccaauguau

SEQ ID NO: 5671 - RNA, 21 nt, Artificial Sequence
  SAMD9 targeting guide sequence portion
gauuaauaaaacaccaagaug

SEQ ID NO: 5672 - RNA, 21 nt, Artificial Sequence
  SAMD9 targeting guide sequence portion
gauuucaagccaauguauuuc

SEQ ID NO: 5673 - RNA, 21 nt, Artificial Sequence
  SAMD9 targeting guide sequence portion
gcaagauuaauaaaacaccaa

SEQ ID NO: 5674 - RNA, 21 nt, Artificial Sequence
  SAMD9 targeting guide sequence portion
gcagaaauacauuggcuugaa

SEQ ID NO: 5675 - RNA, 21 nt, Artificial Sequence
  SAMD9 targeting guide sequence portion
gcuugaaaucaucuugguguu

SEQ ID NO: 5676 - RNA, 21 nt, Artificial Sequence
  SAMD9 targeting guide sequence portion
ggcuugaaaucaucuuggugu

SEQ ID NO: 5677 - RNA, 21 nt, Artificial Sequence
  SAMD9 targeting guide sequence portion
uaaaacaccaagaugauuuca

SEQ ID NO: 5678 - RNA, 21 nt, Artificial Sequence
  SAMD9 targeting guide sequence portion
uaauaaaacaccaagaugauu

SEQ ID NO: 5679 - RNA, 21 nt, Artificial Sequence
  SAMD9 targeting guide sequence portion
uacauuggcuugaaaucaucu

SEQ ID NO: 5680 - RNA, 21 nt, Artificial Sequence
  SAMD9 targeting guide sequence portion
ugaaaucaucuugguguuuua

SEQ ID NO: 5681 - RNA, 21 nt, Artificial Sequence
  SAMD9 targeting guide sequence portion
ugauuucaagccaauguauuu

SEQ ID NO: 5682 - RNA, 21 nt, Artificial Sequence
  SAMD9 targeting guide sequence portion
uggcuugaaaucaucuuggug

SEQ ID NO: 5683 - RNA, 21 nt, Artificial Sequence
  SAMD9 targeting guide sequence portion
uuaauaaaacaccaagaugau

SEQ ID NO: 5684 - RNA, 21 nt, Artificial Sequence
  SAMD9 targeting guide sequence portion
uugaaaucaucuugguguuuu

SEQ ID NO: 5685 - RNA, 21 nt, Artificial Sequence
  SAMD9 targeting guide sequence portion
uuggcuugaaaucaucuuggu

SEQ ID NO: 5686 - RNA, 22 nt, Artificial Sequence
  SAMD9 targeting guide sequence portion
aaaacaccaagaugauuucaag

SEQ ID NO: 5687 - RNA, 22 nt, Artificial Sequence
  SAMD9 targeting guide sequence portion
aaacaccaagaugauuucaagc

SEQ ID NO: 5688 - RNA, 22 nt, Artificial Sequence
  SAMD9 targeting guide sequence portion
aaagcagaaauacauuggcuug

SEQ ID NO: 5689 - RNA, 22 nt, Artificial Sequence
  SAMD9 targeting guide sequence portion
aaauacauuggcuugaaaucau

SEQ ID NO: 5690 - RNA, 22 nt, Artificial Sequence
  SAMD9 targeting guide sequence portion
aaaucaucuugguguuuuauua

SEQ ID NO: 5691 - RNA, 22 nt, Artificial Sequence
  SAMD9 targeting guide sequence portion
aacaccaagaugauuucaagcc

SEQ ID NO: 5692 - RNA, 22 nt, Artificial Sequence
  SAMD9 targeting guide sequence portion
aagaugauuucaagccaaugua

SEQ ID NO: 5693 - RNA, 22 nt, Artificial Sequence
  SAMD9 targeting guide sequence portion
aagauuaauaaaacaccaagau

SEQ ID NO: 5694 - RNA, 22 nt, Artificial Sequence
  SAMD9 targeting guide sequence portion
aagcagaaauacauuggcuuga

SEQ ID NO: 5695 - RNA, 22 nt, Artificial Sequence
  SAMD9 targeting guide sequence portion
aauaaaacaccaagaugauuuc

SEQ ID NO: 5696 - RNA, 22 nt, Artificial Sequence
  SAMD9 targeting guide sequence portion
aauacauuggcuugaaaucauc

SEQ ID NO: 5697 - RNA, 22 nt, Artificial Sequence
  SAMD9 targeting guide sequence portion
aaucaucuugguguuuuauuaa

SEQ ID NO: 5698 - RNA, 22 nt, Artificial Sequence
  SAMD9 targeting guide sequence portion
acaccaagaugauuucaagcca

SEQ ID NO: 5699 - RNA, 22 nt, Artificial Sequence
  SAMD9 targeting guide sequence portion
acauuggcuugaaaucaucuug

SEQ ID NO: 5700 - RNA, 22 nt, Artificial Sequence
  SAMD9 targeting guide sequence portion
accaagaugauuucaagccaau

SEQ ID NO: 5701 - RNA, 22 nt, Artificial Sequence
  SAMD9 targeting guide sequence portion
agaaauacauuggcuugaaauc

SEQ ID NO: 5702 - RNA, 22 nt, Artificial Sequence
  SAMD9 targeting guide sequence portion
agaugauuucaagccaauguau

SEQ ID NO: 5703 - RNA, 22 nt, Artificial Sequence
  SAMD9 targeting guide sequence portion
agauuaauaaaacaccaagaug

SEQ ID NO: 5704 - RNA, 22 nt, Artificial Sequence
  SAMD9 targeting guide sequence portion
agcaagauuaauaaaacaccaa

SEQ ID NO: 5705 - RNA, 22 nt, Artificial Sequence
  SAMD9 targeting guide sequence portion
agcagaaauacauuggcuugaa

SEQ ID NO: 5706 - RNA, 22 nt, Artificial Sequence
  SAMD9 targeting guide sequence portion
auaaaacaccaagaugauuuca

SEQ ID NO: 5707 - RNA, 22 nt, Artificial Sequence
  SAMD9 targeting guide sequence portion
auacauuggcuugaaaucaucu

SEQ ID NO: 5708 - RNA, 22 nt, Artificial Sequence
  SAMD9 targeting guide sequence portion
aucaucuugguguuuuauuaau

SEQ ID NO: 5709 - RNA, 22 nt, Artificial Sequence
  SAMD9 targeting guide sequence portion
augauuucaagccaauguauuu

SEQ ID NO: 5710 - RNA, 22 nt, Artificial Sequence
  SAMD9 targeting guide sequence portion
auuaauaaaacaccaagaugau

SEQ ID NO: 5711 - RNA, 22 nt, Artificial Sequence
  SAMD9 targeting guide sequence portion
auuggcuugaaaucaucuuggu

SEQ ID NO: 5712 - RNA, 22 nt, Artificial Sequence
  SAMD9 targeting guide sequence portion
caagaugauuucaagccaaugu

SEQ ID NO: 5713 - RNA, 22 nt, Artificial Sequence
  SAMD9 targeting guide sequence portion
caagauuaauaaaacaccaaga

SEQ ID NO: 5714 - RNA, 22 nt, Artificial Sequence
  SAMD9 targeting guide sequence portion
caccaagaugauuucaagccaa

SEQ ID NO: 5715 - RNA, 22 nt, Artificial Sequence
  SAMD9 targeting guide sequence portion
cagaaauacauuggcuugaaau

SEQ ID NO: 5716 - RNA, 22 nt, Artificial Sequence
  SAMD9 targeting guide sequence portion
cauuggcuugaaaucaucuugg

SEQ ID NO: 5717 - RNA, 22 nt, Artificial Sequence
  SAMD9 targeting guide sequence portion
ccaagaugauuucaagccaaug

SEQ ID NO: 5718 - RNA, 22 nt, Artificial Sequence
  SAMD9 targeting guide sequence portion
cuugaaaucaucuugguguuuu

SEQ ID NO: 5719 - RNA, 22 nt, Artificial Sequence
  SAMD9 targeting guide sequence portion
gaaauacauuggcuugaaauca

SEQ ID NO: 5720 - RNA, 22 nt, Artificial Sequence
  SAMD9 targeting guide sequence portion
gaaaucaucuugguguuuuauu

SEQ ID NO: 5721 - RNA, 22 nt, Artificial Sequence
  SAMD9 targeting guide sequence portion
gaugauuucaagccaauguauu

SEQ ID NO: 5722 - RNA, 22 nt, Artificial Sequence
  SAMD9 targeting guide sequence portion
gauuaauaaaacaccaagauga

SEQ ID NO: 5723 - RNA, 22 nt, Artificial Sequence
  SAMD9 targeting guide sequence portion
gauuucaagccaauguauuucu

SEQ ID NO: 5724 - RNA, 22 nt, Artificial Sequence
  SAMD9 targeting guide sequence portion
gcaagauuaauaaaacaccaag

SEQ ID NO: 5725 - RNA, 22 nt, Artificial Sequence
  SAMD9 targeting guide sequence portion
gcagaaauacauuggcuugaaa

SEQ ID NO: 5726 - RNA, 22 nt, Artificial Sequence
  SAMD9 targeting guide sequence portion
gcuugaaaucaucuugguguuu

SEQ ID NO: 5727 - RNA, 22 nt, Artificial Sequence
  SAMD9 targeting guide sequence portion
ggcuugaaaucaucuugguguu

SEQ ID NO: 5728 - RNA, 22 nt, Artificial Sequence
  SAMD9 targeting guide sequence portion
uaaaacaccaagaugauuucaa

SEQ ID NO: 5729 - RNA, 22 nt, Artificial Sequence
  SAMD9 targeting guide sequence portion
uaaagcagaaauacauuggcuu

SEQ ID NO: 5730 - RNA, 22 nt, Artificial Sequence
  SAMD9 targeting guide sequence portion
uaauaaaacaccaagaugauuu

SEQ ID NO: 5731 - RNA, 22 nt, Artificial Sequence
  SAMD9 targeting guide sequence portion
uacauuggcuugaaaucaucuu

SEQ ID NO: 5732 - RNA, 22 nt, Artificial Sequence
  SAMD9 targeting guide sequence portion
ugaaaucaucuugguguuuuau

SEQ ID NO: 5733 - RNA, 22 nt, Artificial Sequence
  SAMD9 targeting guide sequence portion
ugauuucaagccaauguauuuc

SEQ ID NO: 5734 - RNA, 22 nt, Artificial Sequence
  SAMD9 targeting guide sequence portion
uggcuugaaaucaucuuggugu

SEQ ID NO: 5735 - RNA, 22 nt, Artificial Sequence
  SAMD9 targeting guide sequence portion
uuaauaaaacaccaagaugauu

SEQ ID NO: 5736 - RNA, 22 nt, Artificial Sequence
  SAMD9 targeting guide sequence portion
uugaaaucaucuugguguuuua

SEQ ID NO: 5737 - RNA, 22 nt, Artificial Sequence
  SAMD9 targeting guide sequence portion
uuggcuugaaaucaucuuggug

SEQ ID NO: 5738 - RNA, 20 nt, Artificial Sequence
  SAMD9 targeting guide sequence portion
aaccacagaggacaguaaua

SEQ ID NO: 5739 - RNA, 20 nt, Artificial Sequence
  SAMD9 targeting guide sequence portion
aaugaggggaucucuugggu

SEQ ID NO: 5740 - RNA, 20 nt, Artificial Sequence
  SAMD9 targeting guide sequence portion
accacagaggacaguaauag

SEQ ID NO: 5741 - RNA, 20 nt, Artificial Sequence
  SAMD9 targeting guide sequence portion
acuguccucugugguugacc

SEQ ID NO: 5742 - RNA, 20 nt, Artificial Sequence
  SAMD9 targeting guide sequence portion
aggggaucucuugggucaac

SEQ ID NO: 5743 - RNA, 20 nt, Artificial Sequence
  SAMD9 targeting guide sequence portion
aucucuugggucaaccacag

SEQ ID NO: 5744 - RNA, 20 nt, Artificial Sequence
  SAMD9 targeting guide sequence portion
augaggggaucucuuggguc

SEQ ID NO: 5745 - RNA, 20 nt, Artificial Sequence
  SAMD9 targeting guide sequence portion
auuacuguccucugugguug

SEQ ID NO: 5746 - RNA, 20 nt, Artificial Sequence
  SAMD9 targeting guide sequence portion
auuucuauuacuguccucug

SEQ ID NO: 5747 - RNA, 20 nt, Artificial Sequence
  SAMD9 targeting guide sequence portion
caaccacagaggacaguaau

SEQ ID NO: 5748 - RNA, 20 nt, Artificial Sequence
  SAMD9 targeting guide sequence portion
caaugaggggaucucuuggg

SEQ ID NO: 5749 - RNA, 20 nt, Artificial Sequence
  SAMD9 targeting guide sequence portion
ccucugugguugacccaaga

SEQ ID NO: 5750 - RNA, 20 nt, Artificial Sequence
  SAMD9 targeting guide sequence portion
cuauuacuguccucuguggu

SEQ ID NO: 5751 - RNA, 20 nt, Artificial Sequence
  SAMD9 targeting guide sequence portion
cucaaugaggggaucucuug

SEQ ID NO: 5752 - RNA, 20 nt, Artificial Sequence
  SAMD9 targeting guide sequence portion
cucugugguugacccaagag

SEQ ID NO: 5753 - RNA, 20 nt, Artificial Sequence
  SAMD9 targeting guide sequence portion
cucuugggucaaccacagag

SEQ ID NO: 5754 - RNA, 20 nt, Artificial Sequence
  SAMD9 targeting guide sequence portion
cuguccucugugguugaccc

SEQ ID NO: 5755 - RNA, 20 nt, Artificial Sequence
  SAMD9 targeting guide sequence portion
cugugguugacccaagagau

SEQ ID NO: 5756 - RNA, 20 nt, Artificial Sequence
  SAMD9 targeting guide sequence portion
cuugggucaaccacagagga

SEQ ID NO: 5757 - RNA, 20 nt, Artificial Sequence
  SAMD9 targeting guide sequence portion
gaggggaucucuugggucaa

SEQ ID NO: 5758 - RNA, 20 nt, Artificial Sequence
  SAMD9 targeting guide sequence portion
gaucucuugggucaaccaca

SEQ ID NO: 5759 - RNA, 20 nt, Artificial Sequence
  SAMD9 targeting guide sequence portion
ggaucucuugggucaaccac

SEQ ID NO: 5760 - RNA, 20 nt, Artificial Sequence
  SAMD9 targeting guide sequence portion
gggaucucuugggucaacca

SEQ ID NO: 5761 - RNA, 20 nt, Artificial Sequence
  SAMD9 targeting guide sequence portion
ggggaucucuugggucaacc

SEQ ID NO: 5762 - RNA, 20 nt, Artificial Sequence
  SAMD9 targeting guide sequence portion
gggucaaccacagaggacag

SEQ ID NO: 5763 - RNA, 20 nt, Artificial Sequence
  SAMD9 targeting guide sequence portion
ggucaaccacagaggacagu

SEQ ID NO: 5764 - RNA, 20 nt, Artificial Sequence
  SAMD9 targeting guide sequence portion
gguugacccaagagaucccc

SEQ ID NO: 5765 - RNA, 20 nt, Artificial Sequence
  SAMD9 targeting guide sequence portion
guauuucuauuacuguccuc

SEQ ID NO: 5766 - RNA, 20 nt, Artificial Sequence
  SAMD9 targeting guide sequence portion
gucaaccacagaggacagua

SEQ ID NO: 5767 - RNA, 20 nt, Artificial Sequence
  SAMD9 targeting guide sequence portion
guccucugugguugacccaa

SEQ ID NO: 5768 - RNA, 20 nt, Artificial Sequence
  SAMD9 targeting guide sequence portion
gugguugacccaagagaucc

SEQ ID NO: 5769 - RNA, 20 nt, Artificial Sequence
  SAMD9 targeting guide sequence portion
guugacccaagagauccccu

SEQ ID NO: 5770 - RNA, 20 nt, Artificial Sequence
  SAMD9 targeting guide sequence portion
uacuguccucugugguugac

SEQ ID NO: 5771 - RNA, 20 nt, Artificial Sequence
  SAMD9 targeting guide sequence portion
uauuacuguccucugugguu

SEQ ID NO: 5772 - RNA, 20 nt, Artificial Sequence
  SAMD9 targeting guide sequence portion
uauuucuauuacuguccucu

SEQ ID NO: 5773 - RNA, 20 nt, Artificial Sequence
  SAMD9 targeting guide sequence portion
ucaaccacagaggacaguaa

SEQ ID NO: 5774 - RNA, 20 nt, Artificial Sequence
  SAMD9 targeting guide sequence portion
ucaaugaggggaucucuugg

SEQ ID NO: 5775 - RNA, 20 nt, Artificial Sequence
  SAMD9 targeting guide sequence portion
uccucugugguugacccaag

SEQ ID NO: 5776 - RNA, 20 nt, Artificial Sequence
  SAMD9 targeting guide sequence portion
ucuauuacuguccucugugg

SEQ ID NO: 5777 - RNA, 20 nt, Artificial Sequence
  SAMD9 targeting guide sequence portion
ucucuugggucaaccacaga

SEQ ID NO: 5778 - RNA, 20 nt, Artificial Sequence
  SAMD9 targeting guide sequence portion
ucugugguugacccaagaga

SEQ ID NO: 5779 - RNA, 20 nt, Artificial Sequence
  SAMD9 targeting guide sequence portion
ucuugggucaaccacagagg

SEQ ID NO: 5780 - RNA, 20 nt, Artificial Sequence
  SAMD9 targeting guide sequence portion
ugaggggaucucuuggguca

SEQ ID NO: 5781 - RNA, 20 nt, Artificial Sequence
  SAMD9 targeting guide sequence portion
ugggucaaccacagaggaca

SEQ ID NO: 5782 - RNA, 20 nt, Artificial Sequence
  SAMD9 targeting guide sequence portion
ugguugacccaagagauccc

SEQ ID NO: 5783 - RNA, 20 nt, Artificial Sequence
  SAMD9 targeting guide sequence portion
uguccucugugguugaccca

SEQ ID NO: 5784 - RNA, 20 nt, Artificial Sequence
  SAMD9 targeting guide sequence portion
ugugguugacccaagagauc

SEQ ID NO: 5785 - RNA, 20 nt, Artificial Sequence
  SAMD9 targeting guide sequence portion
uuacuguccucugugguuga

SEQ ID NO: 5786 - RNA, 20 nt, Artificial Sequence
  SAMD9 targeting guide sequence portion
uucuauuacuguccucugug

SEQ ID NO: 5787 - RNA, 20 nt, Artificial Sequence
  SAMD9 targeting guide sequence portion
uugacccaagagauccccuc

SEQ ID NO: 5788 - RNA, 20 nt, Artificial Sequence
  SAMD9 targeting guide sequence portion
uugggucaaccacagaggac

SEQ ID NO: 5789 - RNA, 20 nt, Artificial Sequence
  SAMD9 targeting guide sequence portion
uuucuauuacuguccucugu

SEQ ID NO: 5790 - RNA, 21 nt, Artificial Sequence
  SAMD9 targeting guide sequence portion
aaccacagaggacaguaauag

SEQ ID NO: 5791 - RNA, 21 nt, Artificial Sequence
  SAMD9 targeting guide sequence portion
aaugaggggaucucuuggguc

SEQ ID NO: 5792 - RNA, 21 nt, Artificial Sequence
  SAMD9 targeting guide sequence portion
accacagaggacaguaauaga

SEQ ID NO: 5793 - RNA, 21 nt, Artificial Sequence
  SAMD9 targeting guide sequence portion
acuguccucugugguugaccc

SEQ ID NO: 5794 - RNA, 21 nt, Artificial Sequence
  SAMD9 targeting guide sequence portion
aggggaucucuugggucaacc

SEQ ID NO: 5795 - RNA, 21 nt, Artificial Sequence
  SAMD9 targeting guide sequence portion
aucucuugggucaaccacaga

SEQ ID NO: 5796 - RNA, 21 nt, Artificial Sequence
  SAMD9 targeting guide sequence portion
augaggggaucucuuggguca

SEQ ID NO: 5797 - RNA, 21 nt, Artificial Sequence
  SAMD9 targeting guide sequence portion
auuacuguccucugugguuga

SEQ ID NO: 5798 - RNA, 21 nt, Artificial Sequence
  SAMD9 targeting guide sequence portion
auuucuauuacuguccucugu

SEQ ID NO: 5799 - RNA, 21 nt, Artificial Sequence
  SAMD9 targeting guide sequence portion
caaccacagaggacaguaaua

SEQ ID NO: 5800 - RNA, 21 nt, Artificial Sequence
  SAMD9 targeting guide sequence portion
caaugaggggaucucuugggu

SEQ ID NO: 5801 - RNA, 21 nt, Artificial Sequence
  SAMD9 targeting guide sequence portion
ccucugugguugacccaagag

SEQ ID NO: 5802 - RNA, 21 nt, Artificial Sequence
  SAMD9 targeting guide sequence portion
cuauuacuguccucugugguu

SEQ ID NO: 5803 - RNA, 21 nt, Artificial Sequence
  SAMD9 targeting guide sequence portion
cucaaugaggggaucucuugg

SEQ ID NO: 5804 - RNA, 21 nt, Artificial Sequence
  SAMD9 targeting guide sequence portion
cucugugguugacccaagaga

SEQ ID NO: 5805 - RNA, 21 nt, Artificial Sequence
  SAMD9 targeting guide sequence portion
cucuugggucaaccacagagg

SEQ ID NO: 5806 - RNA, 21 nt, Artificial Sequence
  SAMD9 targeting guide sequence portion
cuguccucugugguugaccca

SEQ ID NO: 5807 - RNA, 21 nt, Artificial Sequence
  SAMD9 targeting guide sequence portion
cugugguugacccaagagauc

SEQ ID NO: 5808 - RNA, 21 nt, Artificial Sequence
  SAMD9 targeting guide sequence portion
cuugggucaaccacagaggac

SEQ ID NO: 5809 - RNA, 21 nt, Artificial Sequence
  SAMD9 targeting guide sequence portion
gaggggaucucuugggucaac

SEQ ID NO: 5810 - RNA, 21 nt, Artificial Sequence
  SAMD9 targeting guide sequence portion
gaucucuugggucaaccacag

SEQ ID NO: 5811 - RNA, 21 nt, Artificial Sequence
  SAMD9 targeting guide sequence portion
ggaucucuugggucaaccaca

SEQ ID NO: 5812 - RNA, 21 nt, Artificial Sequence
  SAMD9 targeting guide sequence portion
gggaucucuugggucaaccac

SEQ ID NO: 5813 - RNA, 21 nt, Artificial Sequence
  SAMD9 targeting guide sequence portion
ggggaucucuugggucaacca

SEQ ID NO: 5814 - RNA, 21 nt, Artificial Sequence
  SAMD9 targeting guide sequence portion
gggucaaccacagaggacagu

SEQ ID NO: 5815 - RNA, 21 nt, Artificial Sequence
  SAMD9 targeting guide sequence portion
gguauuucuauuacuguccuc

SEQ ID NO: 5816 - RNA, 21 nt, Artificial Sequence
  SAMD9 targeting guide sequence portion
ggucaaccacagaggacagua

SEQ ID NO: 5817 - RNA, 21 nt, Artificial Sequence
  SAMD9 targeting guide sequence portion
gguugacccaagagauccccu

SEQ ID NO: 5818 - RNA, 21 nt, Artificial Sequence
  SAMD9 targeting guide sequence portion
guauuucuauuacuguccucu

SEQ ID NO: 5819 - RNA, 21 nt, Artificial Sequence
  SAMD9 targeting guide sequence portion
gucaaccacagaggacaguaa

SEQ ID NO: 5820 - RNA, 21 nt, Artificial Sequence
  SAMD9 targeting guide sequence portion
guccucugugguugacccaag

SEQ ID NO: 5821 - RNA, 21 nt, Artificial Sequence
  SAMD9 targeting guide sequence portion
gugguugacccaagagauccc

SEQ ID NO: 5822 - RNA, 21 nt, Artificial Sequence
  SAMD9 targeting guide sequence portion
guugacccaagagauccccuc

SEQ ID NO: 5823 - RNA, 21 nt, Artificial Sequence
  SAMD9 targeting guide sequence portion
uacuguccucugugguugacc

SEQ ID NO: 5824 - RNA, 21 nt, Artificial Sequence
  SAMD9 targeting guide sequence portion
uauuacuguccucugugguug

SEQ ID NO: 5825 - RNA, 21 nt, Artificial Sequence
  SAMD9 targeting guide sequence portion
uauuucuauuacuguccucug

SEQ ID NO: 5826 - RNA, 21 nt, Artificial Sequence
  SAMD9 targeting guide sequence portion
ucaaccacagaggacaguaau

SEQ ID NO: 5827 - RNA, 21 nt, Artificial Sequence
  SAMD9 targeting guide sequence portion
ucaaugaggggaucucuuggg

SEQ ID NO: 5828 - RNA, 21 nt, Artificial Sequence
  SAMD9 targeting guide sequence portion
uccucugugguugacccaaga

SEQ ID NO: 5829 - RNA, 21 nt, Artificial Sequence
  SAMD9 targeting guide sequence portion
ucuauuacuguccucuguggu

SEQ ID NO: 5830 - RNA, 21 nt, Artificial Sequence
  SAMD9 targeting guide sequence portion
ucucaaugaggggaucucuug

SEQ ID NO: 5831 - RNA, 21 nt, Artificial Sequence
  SAMD9 targeting guide sequence portion
ucucuugggucaaccacagag

SEQ ID NO: 5832 - RNA, 21 nt, Artificial Sequence
  SAMD9 targeting guide sequence portion
ucugugguugacccaagagau

SEQ ID NO: 5833 - RNA, 21 nt, Artificial Sequence
  SAMD9 targeting guide sequence portion
ucuugggucaaccacagagga

SEQ ID NO: 5834 - RNA, 21 nt, Artificial Sequence
  SAMD9 targeting guide sequence portion
ugaggggaucucuugggucaa

SEQ ID NO: 5835 - RNA, 21 nt, Artificial Sequence
  SAMD9 targeting guide sequence portion
ugggucaaccacagaggacag

SEQ ID NO: 5836 - RNA, 21 nt, Artificial Sequence
  SAMD9 targeting guide sequence portion
ugguugacccaagagaucccc

SEQ ID NO: 5837 - RNA, 21 nt, Artificial Sequence
  SAMD9 targeting guide sequence portion
uguccucugugguugacccaa

SEQ ID NO: 5838 - RNA, 21 nt, Artificial Sequence
  SAMD9 targeting guide sequence portion
ugugguugacccaagagaucc

SEQ ID NO: 5839 - RNA, 21 nt, Artificial Sequence
  SAMD9 targeting guide sequence portion
uuacuguccucugugguugac

SEQ ID NO: 5840 - RNA, 21 nt, Artificial Sequence
  SAMD9 targeting guide sequence portion
uucuauuacuguccucugugg

SEQ ID NO: 5841 - RNA, 21 nt, Artificial Sequence
  SAMD9 targeting guide sequence portion
uugacccaagagauccccuca

SEQ ID NO: 5842 - RNA, 21 nt, Artificial Sequence
  SAMD9 targeting guide sequence portion
uugggucaaccacagaggaca

SEQ ID NO: 5843 - RNA, 21 nt, Artificial Sequence
  SAMD9 targeting guide sequence portion
uuucuauuacuguccucugug

SEQ ID NO: 5844 - RNA, 22 nt, Artificial Sequence
  SAMD9 targeting guide sequence portion
aaccacagaggacaguaauaga

SEQ ID NO: 5845 - RNA, 22 nt, Artificial Sequence
  SAMD9 targeting guide sequence portion
aaugaggggaucucuuggguca

SEQ ID NO: 5846 - RNA, 22 nt, Artificial Sequence
  SAMD9 targeting guide sequence portion
accacagaggacaguaauagaa

SEQ ID NO: 5847 - RNA, 22 nt, Artificial Sequence
  SAMD9 targeting guide sequence portion
acuguccucugugguugaccca

SEQ ID NO: 5848 - RNA, 22 nt, Artificial Sequence
  SAMD9 targeting guide sequence portion
aggggaucucuugggucaacca

SEQ ID NO: 5849 - RNA, 22 nt, Artificial Sequence
  SAMD9 targeting guide sequence portion
aucucuugggucaaccacagag

SEQ ID NO: 5850 - RNA, 22 nt, Artificial Sequence
  SAMD9 targeting guide sequence portion
augaggggaucucuugggucaa

SEQ ID NO: 5851 - RNA, 22 nt, Artificial Sequence
  SAMD9 targeting guide sequence portion
auuacuguccucugugguugac

SEQ ID NO: 5852 - RNA, 22 nt, Artificial Sequence
  SAMD9 targeting guide sequence portion
auuucuauuacuguccucugug

SEQ ID NO: 5853 - RNA, 22 nt, Artificial Sequence
  SAMD9 targeting guide sequence portion
caaccacagaggacaguaauag

SEQ ID NO: 5854 - RNA, 22 nt, Artificial Sequence
  SAMD9 targeting guide sequence portion
caaugaggggaucucuuggguc

SEQ ID NO: 5855 - RNA, 22 nt, Artificial Sequence
  SAMD9 targeting guide sequence portion
ccucugugguugacccaagaga

SEQ ID NO: 5856 - RNA, 22 nt, Artificial Sequence
  SAMD9 targeting guide sequence portion
cuauuacuguccucugugguug

SEQ ID NO: 5857 - RNA, 22 nt, Artificial Sequence
  SAMD9 targeting guide sequence portion
cucaaugaggggaucucuuggg

SEQ ID NO: 5858 - RNA, 22 nt, Artificial Sequence
  SAMD9 targeting guide sequence portion
cucugugguugacccaagagau

SEQ ID NO: 5859 - RNA, 22 nt, Artificial Sequence
  SAMD9 targeting guide sequence portion
cucuugggucaaccacagagga

SEQ ID NO: 5860 - RNA, 22 nt, Artificial Sequence
  SAMD9 targeting guide sequence portion
cuguccucugugguugacccaa

SEQ ID NO: 5861 - RNA, 22 nt, Artificial Sequence
  SAMD9 targeting guide sequence portion
cugugguugacccaagagaucc

SEQ ID NO: 5862 - RNA, 22 nt, Artificial Sequence
  SAMD9 targeting guide sequence portion
cuugggucaaccacagaggaca

SEQ ID NO: 5863 - RNA, 22 nt, Artificial Sequence
  SAMD9 targeting guide sequence portion
gaggggaucucuugggucaacc

SEQ ID NO: 5864 - RNA, 22 nt, Artificial Sequence
  SAMD9 targeting guide sequence portion
gaucucuugggucaaccacaga

SEQ ID NO: 5865 - RNA, 22 nt, Artificial Sequence
  SAMD9 targeting guide sequence portion
ggaucucuugggucaaccacag

SEQ ID NO: 5866 - RNA, 22 nt, Artificial Sequence
  SAMD9 targeting guide sequence portion
gggaucucuugggucaaccaca

SEQ ID NO: 5867 - RNA, 22 nt, Artificial Sequence
  SAMD9 targeting guide sequence portion
ggggaucucuugggucaaccac

SEQ ID NO: 5868 - RNA, 22 nt, Artificial Sequence
  SAMD9 targeting guide sequence portion
gggucaaccacagaggacagua

SEQ ID NO: 5869 - RNA, 22 nt, Artificial Sequence
  SAMD9 targeting guide sequence portion
gguauuucuauuacuguccucu

SEQ ID NO: 5870 - RNA, 22 nt, Artificial Sequence
  SAMD9 targeting guide sequence portion
ggucaaccacagaggacaguaa

SEQ ID NO: 5871 - RNA, 22 nt, Artificial Sequence
  SAMD9 targeting guide sequence portion
gguugacccaagagauccccuc

SEQ ID NO: 5872 - RNA, 22 nt, Artificial Sequence
  SAMD9 targeting guide sequence portion
guauuucuauuacuguccucug

SEQ ID NO: 5873 - RNA, 22 nt, Artificial Sequence
  SAMD9 targeting guide sequence portion
gucaaccacagaggacaguaau

SEQ ID NO: 5874 - RNA, 22 nt, Artificial Sequence
  SAMD9 targeting guide sequence portion
guccucugugguugacccaaga

SEQ ID NO: 5875 - RNA, 22 nt, Artificial Sequence
  SAMD9 targeting guide sequence portion
gucucaaugaggggaucucuug

SEQ ID NO: 5876 - RNA, 22 nt, Artificial Sequence
  SAMD9 targeting guide sequence portion
gugguugacccaagagaucccc

SEQ ID NO: 5877 - RNA, 22 nt, Artificial Sequence
  SAMD9 targeting guide sequence portion
guugacccaagagauccccuca

SEQ ID NO: 5878 - RNA, 22 nt, Artificial Sequence
  SAMD9 targeting guide sequence portion
uacuguccucugugguugaccc

SEQ ID NO: 5879 - RNA, 22 nt, Artificial Sequence
  SAMD9 targeting guide sequence portion
uauuacuguccucugugguuga

SEQ ID NO: 5880 - RNA, 22 nt, Artificial Sequence
  SAMD9 targeting guide sequence portion
uauuucuauuacuguccucugu

SEQ ID NO: 5881 - RNA, 22 nt, Artificial Sequence
  SAMD9 targeting guide sequence portion
ucaaccacagaggacaguaaua

SEQ ID NO: 5882 - RNA, 22 nt, Artificial Sequence
  SAMD9 targeting guide sequence portion
ucaaugaggggaucucuugggu

SEQ ID NO: 5883 - RNA, 22 nt, Artificial Sequence
  SAMD9 targeting guide sequence portion
uccucugugguugacccaagag

SEQ ID NO: 5884 - RNA, 22 nt, Artificial Sequence
  SAMD9 targeting guide sequence portion
ucuauuacuguccucugugguu

SEQ ID NO: 5885 - RNA, 22 nt, Artificial Sequence
  SAMD9 targeting guide sequence portion
ucucaaugaggggaucucuugg

SEQ ID NO: 5886 - RNA, 22 nt, Artificial Sequence
  SAMD9 targeting guide sequence portion
ucucuugggucaaccacagagg

SEQ ID NO: 5887 - RNA, 22 nt, Artificial Sequence
  SAMD9 targeting guide sequence portion
ucugugguugacccaagagauc

SEQ ID NO: 5888 - RNA, 22 nt, Artificial Sequence
  SAMD9 targeting guide sequence portion
ucuugggucaaccacagaggac

SEQ ID NO: 5889 - RNA, 22 nt, Artificial Sequence
  SAMD9 targeting guide sequence portion
ugaggggaucucuugggucaac

SEQ ID NO: 5890 - RNA, 22 nt, Artificial Sequence
  SAMD9 targeting guide sequence portion
ugggucaaccacagaggacagu

SEQ ID NO: 5891 - RNA, 22 nt, Artificial Sequence
  SAMD9 targeting guide sequence portion
ugguauuucuauuacuguccuc

SEQ ID NO: 5892 - RNA, 22 nt, Artificial Sequence
  SAMD9 targeting guide sequence portion
ugguugacccaagagauccccu

SEQ ID NO: 5893 - RNA, 22 nt, Artificial Sequence
  SAMD9 targeting guide sequence portion
uguccucugugguugacccaag

SEQ ID NO: 5894 - RNA, 22 nt, Artificial Sequence
  SAMD9 targeting guide sequence portion
ugugguugacccaagagauccc

SEQ ID NO: 5895 - RNA, 22 nt, Artificial Sequence
  SAMD9 targeting guide sequence portion
uuacuguccucugugguugacc

SEQ ID NO: 5896 - RNA, 22 nt, Artificial Sequence
  SAMD9 targeting guide sequence portion
uucuauuacuguccucuguggu

SEQ ID NO: 5897 - RNA, 22 nt, Artificial Sequence
  SAMD9 targeting guide sequence portion
uugacccaagagauccccucau

SEQ ID NO: 5898 - RNA, 22 nt, Artificial Sequence
  SAMD9 targeting guide sequence portion
uugggucaaccacagaggacag

SEQ ID NO: 5899 - RNA, 22 nt, Artificial Sequence
  SAMD9 targeting guide sequence portion
uuucuauuacuguccucugugg

SEQ ID NO: 5900 - RNA, 20 nt, Artificial Sequence
  SAMD9 targeting guide sequence portion
aaaccuucacuuuccaaguu

SEQ ID NO: 5901 - RNA, 20 nt, Artificial Sequence
  SAMD9 targeting guide sequence portion
aaccuucacuuuccaaguug

SEQ ID NO: 5902 - RNA, 20 nt, Artificial Sequence
  SAMD9 targeting guide sequence portion
aaguugcuauguagaacaga

SEQ ID NO: 5903 - RNA, 20 nt, Artificial Sequence
  SAMD9 targeting guide sequence portion
acauagcaacuuggaaagug

SEQ ID NO: 5904 - RNA, 20 nt, Artificial Sequence
  SAMD9 targeting guide sequence portion
accuucacuuuccaaguugc

SEQ ID NO: 5905 - RNA, 20 nt, Artificial Sequence
  SAMD9 targeting guide sequence portion
acuuuccaaguugcuaugua

SEQ ID NO: 5906 - RNA, 20 nt, Artificial Sequence
  SAMD9 targeting guide sequence portion
agcaaaccuucacuuuccaa

SEQ ID NO: 5907 - RNA, 20 nt, Artificial Sequence
  SAMD9 targeting guide sequence portion
agcaacuuggaaagugaagg

SEQ ID NO: 5908 - RNA, 20 nt, Artificial Sequence
  SAMD9 targeting guide sequence portion
aguugcuauguagaacagaa

SEQ ID NO: 5909 - RNA, 20 nt, Artificial Sequence
  SAMD9 targeting guide sequence portion
auagcaacuuggaaagugaa

SEQ ID NO: 5910 - RNA, 20 nt, Artificial Sequence
  SAMD9 targeting guide sequence portion
caaaccuucacuuuccaagu

SEQ ID NO: 5911 - RNA, 20 nt, Artificial Sequence
  SAMD9 targeting guide sequence portion
caaguugcuauguagaacag

SEQ ID NO: 5912 - RNA, 20 nt, Artificial Sequence
  SAMD9 targeting guide sequence portion
cacuuuccaaguugcuaugu

SEQ ID NO: 5913 - RNA, 20 nt, Artificial Sequence
  SAMD9 targeting guide sequence portion
cauagcaacuuggaaaguga

SEQ ID NO: 5914 - RNA, 20 nt, Artificial Sequence
  SAMD9 targeting guide sequence portion
ccaaguugcuauguagaaca

SEQ ID NO: 5915 - RNA, 20 nt, Artificial Sequence
  SAMD9 targeting guide sequence portion
ccuucacuuuccaaguugcu

SEQ ID NO: 5916 - RNA, 20 nt, Artificial Sequence
  SAMD9 targeting guide sequence portion
cuacauagcaacuuggaaag

SEQ ID NO: 5917 - RNA, 20 nt, Artificial Sequence
  SAMD9 targeting guide sequence portion
cuauguagaacagaaaacca

SEQ ID NO: 5918 - RNA, 20 nt, Artificial Sequence
  SAMD9 targeting guide sequence portion
cuguucuacauagcaacuug

SEQ ID NO: 5919 - RNA, 20 nt, Artificial Sequence
  SAMD9 targeting guide sequence portion
cuucacuuuccaaguugcua

SEQ ID NO: 5920 - RNA, 20 nt, Artificial Sequence
  SAMD9 targeting guide sequence portion
cuuuccaaguugcuauguag

SEQ ID NO: 5921 - RNA, 20 nt, Artificial Sequence
  SAMD9 targeting guide sequence portion
gcaaaccuucacuuuccaag

SEQ ID NO: 5922 - RNA, 20 nt, Artificial Sequence
  SAMD9 targeting guide sequence portion
gcaacuuggaaagugaaggu

SEQ ID NO: 5923 - RNA, 20 nt, Artificial Sequence
  SAMD9 targeting guide sequence portion
gcuauguagaacagaaaacc

SEQ ID NO: 5924 - RNA, 20 nt, Artificial Sequence
  SAMD9 targeting guide sequence portion
ggugugguuuucuguucuac

SEQ ID NO: 5925 - RNA, 20 nt, Artificial Sequence
  SAMD9 targeting guide sequence portion
gguuuucuguucuacauagc

SEQ ID NO: 5926 - RNA, 20 nt, Artificial Sequence
  SAMD9 targeting guide sequence portion
gugguuuucuguucuacaua

SEQ ID NO: 5927 - RNA, 20 nt, Artificial Sequence
  SAMD9 targeting guide sequence portion
gugugguuuucuguucuaca

SEQ ID NO: 5928 - RNA, 20 nt, Artificial Sequence
  SAMD9 targeting guide sequence portion
guucuacauagcaacuugga

SEQ ID NO: 5929 - RNA, 20 nt, Artificial Sequence
  SAMD9 targeting guide sequence portion
guugcuauguagaacagaaa

SEQ ID NO: 5930 - RNA, 20 nt, Artificial Sequence
  SAMD9 targeting guide sequence portion
guuuucuguucuacauagca

SEQ ID NO: 5931 - RNA, 20 nt, Artificial Sequence
  SAMD9 targeting guide sequence portion
uacauagcaacuuggaaagu

SEQ ID NO: 5932 - RNA, 20 nt, Artificial Sequence
  SAMD9 targeting guide sequence portion
uagcaaaccuucacuuucca

SEQ ID NO: 5933 - RNA, 20 nt, Artificial Sequence
  SAMD9 targeting guide sequence portion
uagcaacuuggaaagugaag

SEQ ID NO: 5934 - RNA, 20 nt, Artificial Sequence
  SAMD9 targeting guide sequence portion
ucacuuuccaaguugcuaug

SEQ ID NO: 5935 - RNA, 20 nt, Artificial Sequence
  SAMD9 targeting guide sequence portion
uccaaguugcuauguagaac

SEQ ID NO: 5936 - RNA, 20 nt, Artificial Sequence
  SAMD9 targeting guide sequence portion
ucuacauagcaacuuggaaa

SEQ ID NO: 5937 - RNA, 20 nt, Artificial Sequence
  SAMD9 targeting guide sequence portion
ucuguucuacauagcaacuu

SEQ ID NO: 5938 - RNA, 20 nt, Artificial Sequence
  SAMD9 targeting guide sequence portion
ugcuauguagaacagaaaac

SEQ ID NO: 5939 - RNA, 20 nt, Artificial Sequence
  SAMD9 targeting guide sequence portion
uggugugguuuucuguucua

SEQ ID NO: 5940 - RNA, 20 nt, Artificial Sequence
  SAMD9 targeting guide sequence portion
ugguuuucuguucuacauag

SEQ ID NO: 5941 - RNA, 20 nt, Artificial Sequence
  SAMD9 targeting guide sequence portion
ugugguuuucuguucuacau

SEQ ID NO: 5942 - RNA, 20 nt, Artificial Sequence
  SAMD9 targeting guide sequence portion
uguucuacauagcaacuugg

SEQ ID NO: 5943 - RNA, 20 nt, Artificial Sequence
  SAMD9 targeting guide sequence portion
uucacuuuccaaguugcuau

SEQ ID NO: 5944 - RNA, 20 nt, Artificial Sequence
  SAMD9 targeting guide sequence portion
uuccaaguugcuauguagaa

SEQ ID NO: 5945 - RNA, 20 nt, Artificial Sequence
  SAMD9 targeting guide sequence portion
uucuacauagcaacuuggaa

SEQ ID NO: 5946 - RNA, 20 nt, Artificial Sequence
  SAMD9 targeting guide sequence portion
uucuguucuacauagcaacu

SEQ ID NO: 5947 - RNA, 20 nt, Artificial Sequence
  SAMD9 targeting guide sequence portion
uugcuauguagaacagaaaa

SEQ ID NO: 5948 - RNA, 20 nt, Artificial Sequence
  SAMD9 targeting guide sequence portion
uuggugugguuuucuguucu

SEQ ID NO: 5949 - RNA, 20 nt, Artificial Sequence
  SAMD9 targeting guide sequence portion
uuuccaaguugcuauguaga

SEQ ID NO: 5950 - RNA, 20 nt, Artificial Sequence
  SAMD9 targeting guide sequence portion
uuucuguucuacauagcaac

SEQ ID NO: 5951 - RNA, 20 nt, Artificial Sequence
  SAMD9 targeting guide sequence portion
uuuucuguucuacauagcaa

SEQ ID NO: 5952 - RNA, 21 nt, Artificial Sequence
  SAMD9 targeting guide sequence portion
aaaccuucacuuuccaaguug

SEQ ID NO: 5953 - RNA, 21 nt, Artificial Sequence
  SAMD9 targeting guide sequence portion
aaccuucacuuuccaaguugc

SEQ ID NO: 5954 - RNA, 21 nt, Artificial Sequence
  SAMD9 targeting guide sequence portion
aaguugcuauguagaacagaa

SEQ ID NO: 5955 - RNA, 21 nt, Artificial Sequence
  SAMD9 targeting guide sequence portion
acauagcaacuuggaaaguga

SEQ ID NO: 5956 - RNA, 21 nt, Artificial Sequence
  SAMD9 targeting guide sequence portion
accuucacuuuccaaguugcu

SEQ ID NO: 5957 - RNA, 21 nt, Artificial Sequence
  SAMD9 targeting guide sequence portion
acuuuccaaguugcuauguag

SEQ ID NO: 5958 - RNA, 21 nt, Artificial Sequence
  SAMD9 targeting guide sequence portion
agcaaaccuucacuuuccaag

SEQ ID NO: 5959 - RNA, 21 nt, Artificial Sequence
  SAMD9 targeting guide sequence portion
agcaacuuggaaagugaaggu

SEQ ID NO: 5960 - RNA, 21 nt, Artificial Sequence
  SAMD9 targeting guide sequence portion
aguugcuauguagaacagaaa

SEQ ID NO: 5961 - RNA, 21 nt, Artificial Sequence
  SAMD9 targeting guide sequence portion
auagcaacuuggaaagugaag

SEQ ID NO: 5962 - RNA, 21 nt, Artificial Sequence
  SAMD9 targeting guide sequence portion
caaaccuucacuuuccaaguu

SEQ ID NO: 5963 - RNA, 21 nt, Artificial Sequence
  SAMD9 targeting guide sequence portion
caaguugcuauguagaacaga

SEQ ID NO: 5964 - RNA, 21 nt, Artificial Sequence
  SAMD9 targeting guide sequence portion
cacuuuccaaguugcuaugua

SEQ ID NO: 5965 - RNA, 21 nt, Artificial Sequence
  SAMD9 targeting guide sequence portion
cauagcaacuuggaaagugaa

SEQ ID NO: 5966 - RNA, 21 nt, Artificial Sequence
  SAMD9 targeting guide sequence portion
ccaaguugcuauguagaacag

SEQ ID NO: 5967 - RNA, 21 nt, Artificial Sequence
  SAMD9 targeting guide sequence portion
ccuucacuuuccaaguugcua

SEQ ID NO: 5968 - RNA, 21 nt, Artificial Sequence
  SAMD9 targeting guide sequence portion
cuacauagcaacuuggaaagu

SEQ ID NO: 5969 - RNA, 21 nt, Artificial Sequence
  SAMD9 targeting guide sequence portion
cuauguagaacagaaaaccac

SEQ ID NO: 5970 - RNA, 21 nt, Artificial Sequence
  SAMD9 targeting guide sequence portion
cuguucuacauagcaacuugg

SEQ ID NO: 5971 - RNA, 21 nt, Artificial Sequence
  SAMD9 targeting guide sequence portion
cuucacuuuccaaguugcuau

SEQ ID NO: 5972 - RNA, 21 nt, Artificial Sequence
  SAMD9 targeting guide sequence portion
cuuuccaaguugcuauguaga

SEQ ID NO: 5973 - RNA, 21 nt, Artificial Sequence
  SAMD9 targeting guide sequence portion
gcaaaccuucacuuuccaagu

SEQ ID NO: 5974 - RNA, 21 nt, Artificial Sequence
  SAMD9 targeting guide sequence portion
gcaacuuggaaagugaagguu

SEQ ID NO: 5975 - RNA, 21 nt, Artificial Sequence
  SAMD9 targeting guide sequence portion
gcuauguagaacagaaaacca

SEQ ID NO: 5976 - RNA, 21 nt, Artificial Sequence
  SAMD9 targeting guide sequence portion
ggugugguuuucuguucuaca

SEQ ID NO: 5977 - RNA, 21 nt, Artificial Sequence
  SAMD9 targeting guide sequence portion
gguuuucuguucuacauagca

SEQ ID NO: 5978 - RNA, 21 nt, Artificial Sequence
  SAMD9 targeting guide sequence portion
guagcaaaccuucacuuucca

SEQ ID NO: 5979 - RNA, 21 nt, Artificial Sequence
  SAMD9 targeting guide sequence portion
gugguuuucuguucuacauag

SEQ ID NO: 5980 - RNA, 21 nt, Artificial Sequence
  SAMD9 targeting guide sequence portion
gugugguuuucuguucuacau

SEQ ID NO: 5981 - RNA, 21 nt, Artificial Sequence
  SAMD9 targeting guide sequence portion
guucuacauagcaacuuggaa

SEQ ID NO: 5982 - RNA, 21 nt, Artificial Sequence
  SAMD9 targeting guide sequence portion
guugcuauguagaacagaaaa

SEQ ID NO: 5983 - RNA, 21 nt, Artificial Sequence
  SAMD9 targeting guide sequence portion
guuuucuguucuacauagcaa

SEQ ID NO: 5984 - RNA, 21 nt, Artificial Sequence
  SAMD9 targeting guide sequence portion
uacauagcaacuuggaaagug

SEQ ID NO: 5985 - RNA, 21 nt, Artificial Sequence
  SAMD9 targeting guide sequence portion
uagcaaaccuucacuuuccaa

SEQ ID NO: 5986 - RNA, 21 nt, Artificial Sequence
  SAMD9 targeting guide sequence portion
uagcaacuuggaaagugaagg

SEQ ID NO: 5987 - RNA, 21 nt, Artificial Sequence
  SAMD9 targeting guide sequence portion
ucacuuuccaaguugcuaugu

SEQ ID NO: 5988 - RNA, 21 nt, Artificial Sequence
  SAMD9 targeting guide sequence portion
uccaaguugcuauguagaaca

SEQ ID NO: 5989 - RNA, 21 nt, Artificial Sequence
  SAMD9 targeting guide sequence portion
ucuacauagcaacuuggaaag

SEQ ID NO: 5990 - RNA, 21 nt, Artificial Sequence
  SAMD9 targeting guide sequence portion
ucuguucuacauagcaacuug

SEQ ID NO: 5991 - RNA, 21 nt, Artificial Sequence
  SAMD9 targeting guide sequence portion
ugcuauguagaacagaaaacc

SEQ ID NO: 5992 - RNA, 21 nt, Artificial Sequence
  SAMD9 targeting guide sequence portion
uggugugguuuucuguucuac

SEQ ID NO: 5993 - RNA, 21 nt, Artificial Sequence
  SAMD9 targeting guide sequence portion
ugguuuucuguucuacauagc

SEQ ID NO: 5994 - RNA, 21 nt, Artificial Sequence
  SAMD9 targeting guide sequence portion
ugugguuuucuguucuacaua

SEQ ID NO: 5995 - RNA, 21 nt, Artificial Sequence
  SAMD9 targeting guide sequence portion
uguucuacauagcaacuugga

SEQ ID NO: 5996 - RNA, 21 nt, Artificial Sequence
  SAMD9 targeting guide sequence portion
uucacuuuccaaguugcuaug

SEQ ID NO: 5997 - RNA, 21 nt, Artificial Sequence
  SAMD9 targeting guide sequence portion
uuccaaguugcuauguagaac

SEQ ID NO: 5998 - RNA, 21 nt, Artificial Sequence
  SAMD9 targeting guide sequence portion
uucuacauagcaacuuggaaa

SEQ ID NO: 5999 - RNA, 21 nt, Artificial Sequence
  SAMD9 targeting guide sequence portion
uucuguucuacauagcaacuu

SEQ ID NO: 6000 - RNA, 21 nt, Artificial Sequence
  SAMD9 targeting guide sequence portion
uugcuauguagaacagaaaac

SEQ ID NO: 6001 - RNA, 21 nt, Artificial Sequence
  SAMD9 targeting guide sequence portion
uuggugugguuuucuguucua

SEQ ID NO: 6002 - RNA, 21 nt, Artificial Sequence
  SAMD9 targeting guide sequence portion
uuuccaaguugcuauguagaa

SEQ ID NO: 6003 - RNA, 21 nt, Artificial Sequence
  SAMD9 targeting guide sequence portion
uuucuguucuacauagcaacu

SEQ ID NO: 6004 - RNA, 21 nt, Artificial Sequence
  SAMD9 targeting guide sequence portion
uuuggugugguuuucuguucu

SEQ ID NO: 6005 - RNA, 21 nt, Artificial Sequence
  SAMD9 targeting guide sequence portion
uuuucuguucuacauagcaac

SEQ ID NO: 6006 - RNA, 22 nt, Artificial Sequence
  SAMD9 targeting guide sequence portion
aaaccuucacuuuccaaguugc

SEQ ID NO: 6007 - RNA, 22 nt, Artificial Sequence
  SAMD9 targeting guide sequence portion
aaccuucacuuuccaaguugcu

SEQ ID NO: 6008 - RNA, 22 nt, Artificial Sequence
  SAMD9 targeting guide sequence portion
aaguugcuauguagaacagaaa

SEQ ID NO: 6009 - RNA, 22 nt, Artificial Sequence
  SAMD9 targeting guide sequence portion
acauagcaacuuggaaagugaa

SEQ ID NO: 6010 - RNA, 22 nt, Artificial Sequence
  SAMD9 targeting guide sequence portion
accuucacuuuccaaguugcua

SEQ ID NO: 6011 - RNA, 22 nt, Artificial Sequence
  SAMD9 targeting guide sequence portion
acuuuccaaguugcuauguaga

SEQ ID NO: 6012 - RNA, 22 nt, Artificial Sequence
  SAMD9 targeting guide sequence portion
agcaaaccuucacuuuccaagu

SEQ ID NO: 6013 - RNA, 22 nt, Artificial Sequence
  SAMD9 targeting guide sequence portion
agcaacuuggaaagugaagguu

SEQ ID NO: 6014 - RNA, 22 nt, Artificial Sequence
  SAMD9 targeting guide sequence portion
aguagcaaaccuucacuuucca

SEQ ID NO: 6015 - RNA, 22 nt, Artificial Sequence
  SAMD9 targeting guide sequence portion
aguugcuauguagaacagaaaa

SEQ ID NO: 6016 - RNA, 22 nt, Artificial Sequence
  SAMD9 targeting guide sequence portion
auagcaacuuggaaagugaagg

SEQ ID NO: 6017 - RNA, 22 nt, Artificial Sequence
  SAMD9 targeting guide sequence portion
auuuggugugguuuucuguucu

SEQ ID NO: 6018 - RNA, 22 nt, Artificial Sequence
  SAMD9 targeting guide sequence portion
caaaccuucacuuuccaaguug

SEQ ID NO: 6019 - RNA, 22 nt, Artificial Sequence
  SAMD9 targeting guide sequence portion
caaguugcuauguagaacagaa

SEQ ID NO: 6020 - RNA, 22 nt, Artificial Sequence
  SAMD9 targeting guide sequence portion
cacuuuccaaguugcuauguag

SEQ ID NO: 6021 - RNA, 22 nt, Artificial Sequence
  SAMD9 targeting guide sequence portion
cauagcaacuuggaaagugaag

SEQ ID NO: 6022 - RNA, 22 nt, Artificial Sequence
  SAMD9 targeting guide sequence portion
ccaaguugcuauguagaacaga

SEQ ID NO: 6023 - RNA, 22 nt, Artificial Sequence
  SAMD9 targeting guide sequence portion
ccuucacuuuccaaguugcuau

SEQ ID NO: 6024 - RNA, 22 nt, Artificial Sequence
  SAMD9 targeting guide sequence portion
cuacauagcaacuuggaaagug

SEQ ID NO: 6025 - RNA, 22 nt, Artificial Sequence
  SAMD9 targeting guide sequence portion
cuauguagaacagaaaaccaca

SEQ ID NO: 6026 - RNA, 22 nt, Artificial Sequence
  SAMD9 targeting guide sequence portion
cuguucuacauagcaacuugga

SEQ ID NO: 6027 - RNA, 22 nt, Artificial Sequence
  SAMD9 targeting guide sequence portion
cuucacuuuccaaguugcuaug

SEQ ID NO: 6028 - RNA, 22 nt, Artificial Sequence
  SAMD9 targeting guide sequence portion
cuuuccaaguugcuauguagaa

SEQ ID NO: 6029 - RNA, 22 nt, Artificial Sequence
  SAMD9 targeting guide sequence portion
gcaaaccuucacuuuccaaguu

SEQ ID NO: 6030 - RNA, 22 nt, Artificial Sequence
  SAMD9 targeting guide sequence portion
gcaacuuggaaagugaagguuu

SEQ ID NO: 6031 - RNA, 22 nt, Artificial Sequence
  SAMD9 targeting guide sequence portion
gcuauguagaacagaaaaccac

SEQ ID NO: 6032 - RNA, 22 nt, Artificial Sequence
  SAMD9 targeting guide sequence portion
ggugugguuuucuguucuacau

SEQ ID NO: 6033 - RNA, 22 nt, Artificial Sequence
  SAMD9 targeting guide sequence portion
gguuuucuguucuacauagcaa

SEQ ID NO: 6034 - RNA, 22 nt, Artificial Sequence
  SAMD9 targeting guide sequence portion
guagcaaaccuucacuuuccaa

SEQ ID NO: 6035 - RNA, 22 nt, Artificial Sequence
  SAMD9 targeting guide sequence portion
gugguuuucuguucuacauagc

SEQ ID NO: 6036 - RNA, 22 nt, Artificial Sequence
  SAMD9 targeting guide sequence portion
gugugguuuucuguucuacaua

SEQ ID NO: 6037 - RNA, 22 nt, Artificial Sequence
  SAMD9 targeting guide sequence portion
guucuacauagcaacuuggaaa

SEQ ID NO: 6038 - RNA, 22 nt, Artificial Sequence
  SAMD9 targeting guide sequence portion
guugcuauguagaacagaaaac

SEQ ID NO: 6039 - RNA, 22 nt, Artificial Sequence
  SAMD9 targeting guide sequence portion
guuuucuguucuacauagcaac

SEQ ID NO: 6040 - RNA, 22 nt, Artificial Sequence
  SAMD9 targeting guide sequence portion
uacauagcaacuuggaaaguga

SEQ ID NO: 6041 - RNA, 22 nt, Artificial Sequence
  SAMD9 targeting guide sequence portion
uagcaaaccuucacuuuccaag

SEQ ID NO: 6042 - RNA, 22 nt, Artificial Sequence
  SAMD9 targeting guide sequence portion
uagcaacuuggaaagugaaggu

SEQ ID NO: 6043 - RNA, 22 nt, Artificial Sequence
  SAMD9 targeting guide sequence portion
ucacuuuccaaguugcuaugua

SEQ ID NO: 6044 - RNA, 22 nt, Artificial Sequence
  SAMD9 targeting guide sequence portion
uccaaguugcuauguagaacag

SEQ ID NO: 6045 - RNA, 22 nt, Artificial Sequence
  SAMD9 targeting guide sequence portion
ucuacauagcaacuuggaaagu

SEQ ID NO: 6046 - RNA, 22 nt, Artificial Sequence
  SAMD9 targeting guide sequence portion
ucuguucuacauagcaacuugg

SEQ ID NO: 6047 - RNA, 22 nt, Artificial Sequence
  SAMD9 targeting guide sequence portion
ugcuauguagaacagaaaacca

SEQ ID NO: 6048 - RNA, 22 nt, Artificial Sequence
  SAMD9 targeting guide sequence portion
uggugugguuuucuguucuaca

SEQ ID NO: 6049 - RNA, 22 nt, Artificial Sequence
  SAMD9 targeting guide sequence portion
ugguuuucuguucuacauagca

SEQ ID NO: 6050 - RNA, 22 nt, Artificial Sequence
  SAMD9 targeting guide sequence portion
ugugguuuucuguucuacauag

SEQ ID NO: 6051 - RNA, 22 nt, Artificial Sequence
  SAMD9 targeting guide sequence portion
uguucuacauagcaacuuggaa

SEQ ID NO: 6052 - RNA, 22 nt, Artificial Sequence
  SAMD9 targeting guide sequence portion
uucacuuuccaaguugcuaugu

SEQ ID NO: 6053 - RNA, 22 nt, Artificial Sequence
  SAMD9 targeting guide sequence portion
uuccaaguugcuauguagaaca

SEQ ID NO: 6054 - RNA, 22 nt, Artificial Sequence
  SAMD9 targeting guide sequence portion
uucuacauagcaacuuggaaag

SEQ ID NO: 6055 - RNA, 22 nt, Artificial Sequence
  SAMD9 targeting guide sequence portion
uucuguucuacauagcaacuug

SEQ ID NO: 6056 - RNA, 22 nt, Artificial Sequence
  SAMD9 targeting guide sequence portion
uugcuauguagaacagaaaacc

SEQ ID NO: 6057 - RNA, 22 nt, Artificial Sequence
  SAMD9 targeting guide sequence portion
uuggugugguuuucuguucuac

SEQ ID NO: 6058 - RNA, 22 nt, Artificial Sequence
  SAMD9 targeting guide sequence portion
uuuccaaguugcuauguagaac

SEQ ID NO: 6059 - RNA, 22 nt, Artificial Sequence
  SAMD9 targeting guide sequence portion
uuucuguucuacauagcaacuu

SEQ ID NO: 6060 - RNA, 22 nt, Artificial Sequence
  SAMD9 targeting guide sequence portion
uuuggugugguuuucuguucua

SEQ ID NO: 6061 - RNA, 22 nt, Artificial Sequence
  SAMD9 targeting guide sequence portion
uuuucuguucuacauagcaacu

SEQ ID NO: 6062 - RNA, 20 nt, Artificial Sequence
  SAMD9 targeting guide sequence portion
aaccuucacuuuccaaguuc

SEQ ID NO: 6063 - RNA, 20 nt, Artificial Sequence
  SAMD9 targeting guide sequence portion
aaguucauauguagaacaga

SEQ ID NO: 6064 - RNA, 20 nt, Artificial Sequence
  SAMD9 targeting guide sequence portion
acauaugaacuuggaaagug

SEQ ID NO: 6065 - RNA, 20 nt, Artificial Sequence
  SAMD9 targeting guide sequence portion
accuucacuuuccaaguuca

SEQ ID NO: 6066 - RNA, 20 nt, Artificial Sequence
  SAMD9 targeting guide sequence portion
acuuuccaaguucauaugua

SEQ ID NO: 6067 - RNA, 20 nt, Artificial Sequence
  SAMD9 targeting guide sequence portion
aguucauauguagaacagaa

SEQ ID NO: 6068 - RNA, 20 nt, Artificial Sequence
  SAMD9 targeting guide sequence portion
auaugaacuuggaaagugaa

SEQ ID NO: 6069 - RNA, 20 nt, Artificial Sequence
  SAMD9 targeting guide sequence portion
augaacuuggaaagugaagg

SEQ ID NO: 6070 - RNA, 20 nt, Artificial Sequence
  SAMD9 targeting guide sequence portion
caaguucauauguagaacag

SEQ ID NO: 6071 - RNA, 20 nt, Artificial Sequence
  SAMD9 targeting guide sequence portion
cacuuuccaaguucauaugu

SEQ ID NO: 6072 - RNA, 20 nt, Artificial Sequence
  SAMD9 targeting guide sequence portion
cauaugaacuuggaaaguga

SEQ ID NO: 6073 - RNA, 20 nt, Artificial Sequence
  SAMD9 targeting guide sequence portion
cauauguagaacagaaaacc

SEQ ID NO: 6074 - RNA, 20 nt, Artificial Sequence
  SAMD9 targeting guide sequence portion
ccaaguucauauguagaaca

SEQ ID NO: 6075 - RNA, 20 nt, Artificial Sequence
  SAMD9 targeting guide sequence portion
ccuucacuuuccaaguucau

SEQ ID NO: 6076 - RNA, 20 nt, Artificial Sequence
  SAMD9 targeting guide sequence portion
cuacauaugaacuuggaaag

SEQ ID NO: 6077 - RNA, 20 nt, Artificial Sequence
  SAMD9 targeting guide sequence portion
cuguucuacauaugaacuug

SEQ ID NO: 6078 - RNA, 20 nt, Artificial Sequence
  SAMD9 targeting guide sequence portion
cuucacuuuccaaguucaua

SEQ ID NO: 6079 - RNA, 20 nt, Artificial Sequence
  SAMD9 targeting guide sequence portion
cuuuccaaguucauauguag

SEQ ID NO: 6080 - RNA, 20 nt, Artificial Sequence
  SAMD9 targeting guide sequence portion
gaacuuggaaagugaagguu

SEQ ID NO: 6081 - RNA, 20 nt, Artificial Sequence
  SAMD9 targeting guide sequence portion
gguuuucuguucuacauaug

SEQ ID NO: 6082 - RNA, 20 nt, Artificial Sequence
  SAMD9 targeting guide sequence portion
guagcaaaccuucacuuucc

SEQ ID NO: 6083 - RNA, 20 nt, Artificial Sequence
  SAMD9 targeting guide sequence portion
guucauauguagaacagaaa

SEQ ID NO: 6084 - RNA, 20 nt, Artificial Sequence
  SAMD9 targeting guide sequence portion
guucuacauaugaacuugga

SEQ ID NO: 6085 - RNA, 20 nt, Artificial Sequence
  SAMD9 targeting guide sequence portion
guuuucuguucuacauauga

SEQ ID NO: 6086 - RNA, 20 nt, Artificial Sequence
  SAMD9 targeting guide sequence portion
uacauaugaacuuggaaagu

SEQ ID NO: 6087 - RNA, 20 nt, Artificial Sequence
  SAMD9 targeting guide sequence portion
uaugaacuuggaaagugaag

SEQ ID NO: 6088 - RNA, 20 nt, Artificial Sequence
  SAMD9 targeting guide sequence portion
ucacuuuccaaguucauaug

SEQ ID NO: 6089 - RNA, 20 nt, Artificial Sequence
  SAMD9 targeting guide sequence portion
ucauauguagaacagaaaac

SEQ ID NO: 6090 - RNA, 20 nt, Artificial Sequence
  SAMD9 targeting guide sequence portion
uccaaguucauauguagaac

SEQ ID NO: 6091 - RNA, 20 nt, Artificial Sequence
  SAMD9 targeting guide sequence portion
ucuacauaugaacuuggaaa

SEQ ID NO: 6092 - RNA, 20 nt, Artificial Sequence
  SAMD9 targeting guide sequence portion
ucuguucuacauaugaacuu

SEQ ID NO: 6093 - RNA, 20 nt, Artificial Sequence
  SAMD9 targeting guide sequence portion
ugaacuuggaaagugaaggu

SEQ ID NO: 6094 - RNA, 20 nt, Artificial Sequence
  SAMD9 targeting guide sequence portion
ugguuuucuguucuacauau

SEQ ID NO: 6095 - RNA, 20 nt, Artificial Sequence
  SAMD9 targeting guide sequence portion
uguucuacauaugaacuugg

SEQ ID NO: 6096 - RNA, 20 nt, Artificial Sequence
  SAMD9 targeting guide sequence portion
uucacuuuccaaguucauau

SEQ ID NO: 6097 - RNA, 20 nt, Artificial Sequence
  SAMD9 targeting guide sequence portion
uucauauguagaacagaaaa

SEQ ID NO: 6098 - RNA, 20 nt, Artificial Sequence
  SAMD9 targeting guide sequence portion
uuccaaguucauauguagaa

SEQ ID NO: 6099 - RNA, 20 nt, Artificial Sequence
  SAMD9 targeting guide sequence portion
uucuacauaugaacuuggaa

SEQ ID NO: 6100 - RNA, 20 nt, Artificial Sequence
  SAMD9 targeting guide sequence portion
uucuguucuacauaugaacu

SEQ ID NO: 6101 - RNA, 20 nt, Artificial Sequence
  SAMD9 targeting guide sequence portion
uuuccaaguucauauguaga

SEQ ID NO: 6102 - RNA, 20 nt, Artificial Sequence
  SAMD9 targeting guide sequence portion
uuucuguucuacauaugaac

SEQ ID NO: 6103 - RNA, 20 nt, Artificial Sequence
  SAMD9 targeting guide sequence portion
uuuucuguucuacauaugaa

SEQ ID NO: 6104 - RNA, 21 nt, Artificial Sequence
  SAMD9 targeting guide sequence portion
aaaccuucacuuuccaaguuc

SEQ ID NO: 6105 - RNA, 21 nt, Artificial Sequence
  SAMD9 targeting guide sequence portion
aaccuucacuuuccaaguuca

SEQ ID NO: 6106 - RNA, 21 nt, Artificial Sequence
  SAMD9 targeting guide sequence portion
aaguucauauguagaacagaa

SEQ ID NO: 6107 - RNA, 21 nt, Artificial Sequence
  SAMD9 targeting guide sequence portion
acauaugaacuuggaaaguga

SEQ ID NO: 6108 - RNA, 21 nt, Artificial Sequence
  SAMD9 targeting guide sequence portion
accuucacuuuccaaguucau

SEQ ID NO: 6109 - RNA, 21 nt, Artificial Sequence
  SAMD9 targeting guide sequence portion
acuuuccaaguucauauguag

SEQ ID NO: 6110 - RNA, 21 nt, Artificial Sequence
  SAMD9 targeting guide sequence portion
aguagcaaaccuucacuuucc

SEQ ID NO: 6111 - RNA, 21 nt, Artificial Sequence
  SAMD9 targeting guide sequence portion
aguucauauguagaacagaaa

SEQ ID NO: 6112 - RNA, 21 nt, Artificial Sequence
  SAMD9 targeting guide sequence portion
auaugaacuuggaaagugaag

SEQ ID NO: 6113 - RNA, 21 nt, Artificial Sequence
  SAMD9 targeting guide sequence portion
augaacuuggaaagugaaggu

SEQ ID NO: 6114 - RNA, 21 nt, Artificial Sequence
  SAMD9 targeting guide sequence portion
caaguucauauguagaacaga

SEQ ID NO: 6115 - RNA, 21 nt, Artificial Sequence
  SAMD9 targeting guide sequence portion
cacuuuccaaguucauaugua

SEQ ID NO: 6116 - RNA, 21 nt, Artificial Sequence
  SAMD9 targeting guide sequence portion
cauaugaacuuggaaagugaa

SEQ ID NO: 6117 - RNA, 21 nt, Artificial Sequence
  SAMD9 targeting guide sequence portion
cauauguagaacagaaaacca

SEQ ID NO: 6118 - RNA, 21 nt, Artificial Sequence
  SAMD9 targeting guide sequence portion
ccaaguucauauguagaacag

SEQ ID NO: 6119 - RNA, 21 nt, Artificial Sequence
  SAMD9 targeting guide sequence portion
ccuucacuuuccaaguucaua

SEQ ID NO: 6120 - RNA, 21 nt, Artificial Sequence
  SAMD9 targeting guide sequence portion
cuacauaugaacuuggaaagu

SEQ ID NO: 6121 - RNA, 21 nt, Artificial Sequence
  SAMD9 targeting guide sequence portion
cuguucuacauaugaacuugg

SEQ ID NO: 6122 - RNA, 21 nt, Artificial Sequence
  SAMD9 targeting guide sequence portion
cuucacuuuccaaguucauau

SEQ ID NO: 6123 - RNA, 21 nt, Artificial Sequence
  SAMD9 targeting guide sequence portion
cuuuccaaguucauauguaga

SEQ ID NO: 6124 - RNA, 21 nt, Artificial Sequence
  SAMD9 targeting guide sequence portion
gaacuuggaaagugaagguuu

SEQ ID NO: 6125 - RNA, 21 nt, Artificial Sequence
  SAMD9 targeting guide sequence portion
gguuuucuguucuacauauga

SEQ ID NO: 6126 - RNA, 21 nt, Artificial Sequence
  SAMD9 targeting guide sequence portion
gugguuuucuguucuacauau

SEQ ID NO: 6127 - RNA, 21 nt, Artificial Sequence
  SAMD9 targeting guide sequence portion
guucauauguagaacagaaaa

SEQ ID NO: 6128 - RNA, 21 nt, Artificial Sequence
  SAMD9 targeting guide sequence portion
guucuacauaugaacuuggaa

SEQ ID NO: 6129 - RNA, 21 nt, Artificial Sequence
  SAMD9 targeting guide sequence portion
guuuucuguucuacauaugaa

SEQ ID NO: 6130 - RNA, 21 nt, Artificial Sequence
  SAMD9 targeting guide sequence portion
uacauaugaacuuggaaagug

SEQ ID NO: 6131 - RNA, 21 nt, Artificial Sequence
  SAMD9 targeting guide sequence portion
uaugaacuuggaaagugaagg

SEQ ID NO: 6132 - RNA, 21 nt, Artificial Sequence
  SAMD9 targeting guide sequence portion
ucacuuuccaaguucauaugu

SEQ ID NO: 6133 - RNA, 21 nt, Artificial Sequence
  SAMD9 targeting guide sequence portion
ucauauguagaacagaaaacc

SEQ ID NO: 6134 - RNA, 21 nt, Artificial Sequence
  SAMD9 targeting guide sequence portion
uccaaguucauauguagaaca

SEQ ID NO: 6135 - RNA, 21 nt, Artificial Sequence
  SAMD9 targeting guide sequence portion
ucuacauaugaacuuggaaag

SEQ ID NO: 6136 - RNA, 21 nt, Artificial Sequence
  SAMD9 targeting guide sequence portion
ucuguucuacauaugaacuug

SEQ ID NO: 6137 - RNA, 21 nt, Artificial Sequence
  SAMD9 targeting guide sequence portion
ugaacuuggaaagugaagguu

SEQ ID NO: 6138 - RNA, 21 nt, Artificial Sequence
  SAMD9 targeting guide sequence portion
ugguuuucuguucuacauaug

SEQ ID NO: 6139 - RNA, 21 nt, Artificial Sequence
  SAMD9 targeting guide sequence portion
uguucuacauaugaacuugga

SEQ ID NO: 6140 - RNA, 21 nt, Artificial Sequence
  SAMD9 targeting guide sequence portion
uucacuuuccaaguucauaug

SEQ ID NO: 6141 - RNA, 21 nt, Artificial Sequence
  SAMD9 targeting guide sequence portion
uucauauguagaacagaaaac

SEQ ID NO: 6142 - RNA, 21 nt, Artificial Sequence
  SAMD9 targeting guide sequence portion
uuccaaguucauauguagaac

SEQ ID NO: 6143 - RNA, 21 nt, Artificial Sequence
  SAMD9 targeting guide sequence portion
uucuacauaugaacuuggaaa

SEQ ID NO: 6144 - RNA, 21 nt, Artificial Sequence
  SAMD9 targeting guide sequence portion
uucuguucuacauaugaacuu

SEQ ID NO: 6145 - RNA, 21 nt, Artificial Sequence
  SAMD9 targeting guide sequence portion
uuuccaaguucauauguagaa

SEQ ID NO: 6146 - RNA, 21 nt, Artificial Sequence
  SAMD9 targeting guide sequence portion
uuucuguucuacauaugaacu

SEQ ID NO: 6147 - RNA, 21 nt, Artificial Sequence
  SAMD9 targeting guide sequence portion
uuuucuguucuacauaugaac

SEQ ID NO: 6148 - RNA, 22 nt, Artificial Sequence
  SAMD9 targeting guide sequence portion
aaaccuucacuuuccaaguuca

SEQ ID NO: 6149 - RNA, 22 nt, Artificial Sequence
  SAMD9 targeting guide sequence portion
aaccuucacuuuccaaguucau

SEQ ID NO: 6150 - RNA, 22 nt, Artificial Sequence
  SAMD9 targeting guide sequence portion
aaguucauauguagaacagaaa

SEQ ID NO: 6151 - RNA, 22 nt, Artificial Sequence
  SAMD9 targeting guide sequence portion
acauaugaacuuggaaagugaa

SEQ ID NO: 6152 - RNA, 22 nt, Artificial Sequence
  SAMD9 targeting guide sequence portion
accuucacuuuccaaguucaua

SEQ ID NO: 6153 - RNA, 22 nt, Artificial Sequence
  SAMD9 targeting guide sequence portion
acuuuccaaguucauauguaga

SEQ ID NO: 6154 - RNA, 22 nt, Artificial Sequence
  SAMD9 targeting guide sequence portion
aguucauauguagaacagaaaa

SEQ ID NO: 6155 - RNA, 22 nt, Artificial Sequence
  SAMD9 targeting guide sequence portion
auaugaacuuggaaagugaagg

SEQ ID NO: 6156 - RNA, 22 nt, Artificial Sequence
  SAMD9 targeting guide sequence portion
augaacuuggaaagugaagguu

SEQ ID NO: 6157 - RNA, 22 nt, Artificial Sequence
  SAMD9 targeting guide sequence portion
caaaccuucacuuuccaaguuc

SEQ ID NO: 6158 - RNA, 22 nt, Artificial Sequence
  SAMD9 targeting guide sequence portion
caaguucauauguagaacagaa

SEQ ID NO: 6159 - RNA, 22 nt, Artificial Sequence
  SAMD9 targeting guide sequence portion
cacuuuccaaguucauauguag

SEQ ID NO: 6160 - RNA, 22 nt, Artificial Sequence
  SAMD9 targeting guide sequence portion
cauaugaacuuggaaagugaag

SEQ ID NO: 6161 - RNA, 22 nt, Artificial Sequence
  SAMD9 targeting guide sequence portion
cauauguagaacagaaaaccac

SEQ ID NO: 6162 - RNA, 22 nt, Artificial Sequence
  SAMD9 targeting guide sequence portion
ccaaguucauauguagaacaga

SEQ ID NO: 6163 - RNA, 22 nt, Artificial Sequence
  SAMD9 targeting guide sequence portion
ccuucacuuuccaaguucauau

SEQ ID NO: 6164 - RNA, 22 nt, Artificial Sequence
  SAMD9 targeting guide sequence portion
cuacauaugaacuuggaaagug

SEQ ID NO: 6165 - RNA, 22 nt, Artificial Sequence
  SAMD9 targeting guide sequence portion
cuguucuacauaugaacuugga

SEQ ID NO: 6166 - RNA, 22 nt, Artificial Sequence
  SAMD9 targeting guide sequence portion
cuucacuuuccaaguucauaug

SEQ ID NO: 6167 - RNA, 22 nt, Artificial Sequence
  SAMD9 targeting guide sequence portion
cuuuccaaguucauauguagaa

SEQ ID NO: 6168 - RNA, 22 nt, Artificial Sequence
  SAMD9 targeting guide sequence portion
gaacuuggaaagugaagguuug

SEQ ID NO: 6169 - RNA, 22 nt, Artificial Sequence
  SAMD9 targeting guide sequence portion
gaguagcaaaccuucacuuucc

SEQ ID NO: 6170 - RNA, 22 nt, Artificial Sequence
  SAMD9 targeting guide sequence portion
gguuuucuguucuacauaugaa

SEQ ID NO: 6171 - RNA, 22 nt, Artificial Sequence
  SAMD9 targeting guide sequence portion
gugguuuucuguucuacauaug

SEQ ID NO: 6172 - RNA, 22 nt, Artificial Sequence
  SAMD9 targeting guide sequence portion
guucauauguagaacagaaaac

SEQ ID NO: 6173 - RNA, 22 nt, Artificial Sequence
  SAMD9 targeting guide sequence portion
guucuacauaugaacuuggaaa

SEQ ID NO: 6174 - RNA, 22 nt, Artificial Sequence
  SAMD9 targeting guide sequence portion
guuuucuguucuacauaugaac

SEQ ID NO: 6175 - RNA, 22 nt, Artificial Sequence
  SAMD9 targeting guide sequence portion
uacauaugaacuuggaaaguga

SEQ ID NO: 6176 - RNA, 22 nt, Artificial Sequence
  SAMD9 targeting guide sequence portion
uaugaacuuggaaagugaaggu

SEQ ID NO: 6177 - RNA, 22 nt, Artificial Sequence
  SAMD9 targeting guide sequence portion
ucacuuuccaaguucauaugua

SEQ ID NO: 6178 - RNA, 22 nt, Artificial Sequence
  SAMD9 targeting guide sequence portion
ucauauguagaacagaaaacca

SEQ ID NO: 6179 - RNA, 22 nt, Artificial Sequence
  SAMD9 targeting guide sequence portion
uccaaguucauauguagaacag

SEQ ID NO: 6180 - RNA, 22 nt, Artificial Sequence
  SAMD9 targeting guide sequence portion
ucuacauaugaacuuggaaagu

SEQ ID NO: 6181 - RNA, 22 nt, Artificial Sequence
  SAMD9 targeting guide sequence portion
ucuguucuacauaugaacuugg

SEQ ID NO: 6182 - RNA, 22 nt, Artificial Sequence
  SAMD9 targeting guide sequence portion
ugaacuuggaaagugaagguuu

SEQ ID NO: 6183 - RNA, 22 nt, Artificial Sequence
  SAMD9 targeting guide sequence portion
ugguuuucuguucuacauauga

SEQ ID NO: 6184 - RNA, 22 nt, Artificial Sequence
  SAMD9 targeting guide sequence portion
ugugguuuucuguucuacauau

SEQ ID NO: 6185 - RNA, 22 nt, Artificial Sequence
  SAMD9 targeting guide sequence portion
uguucuacauaugaacuuggaa

SEQ ID NO: 6186 - RNA, 22 nt, Artificial Sequence
  SAMD9 targeting guide sequence portion
uucacuuuccaaguucauaugu

SEQ ID NO: 6187 - RNA, 22 nt, Artificial Sequence
  SAMD9 targeting guide sequence portion
uucauauguagaacagaaaacc

SEQ ID NO: 6188 - RNA, 22 nt, Artificial Sequence
  SAMD9 targeting guide sequence portion
uuccaaguucauauguagaaca

SEQ ID NO: 6189 - RNA, 22 nt, Artificial Sequence
  SAMD9 targeting guide sequence portion
uucuacauaugaacuuggaaag

SEQ ID NO: 6190 - RNA, 22 nt, Artificial Sequence
  SAMD9 targeting guide sequence portion
uucuguucuacauaugaacuug

SEQ ID NO: 6191 - RNA, 22 nt, Artificial Sequence
  SAMD9 targeting guide sequence portion
uuuccaaguucauauguagaac

SEQ ID NO: 6192 - RNA, 22 nt, Artificial Sequence
  SAMD9 targeting guide sequence portion
uuucuguucuacauaugaacuu

SEQ ID NO: 6193 - RNA, 22 nt, Artificial Sequence
  SAMD9 targeting guide sequence portion
uuuucuguucuacauaugaacu

SEQ ID NO: 6194 - RNA, 20 nt, Artificial Sequence
  SAMD9 targeting guide sequence portion
aaagaaagccaaguagcaaa

SEQ ID NO: 6195 - RNA, 20 nt, Artificial Sequence
  SAMD9 targeting guide sequence portion
aaagccaaguagcaaaccuu

SEQ ID NO: 6196 - RNA, 20 nt, Artificial Sequence
  SAMD9 targeting guide sequence portion
aaagcuuacaaagaaagcca

SEQ ID NO: 6197 - RNA, 20 nt, Artificial Sequence
  SAMD9 targeting guide sequence portion
aaagugaagguuugcuacuu

SEQ ID NO: 6198 - RNA, 20 nt, Artificial Sequence
  SAMD9 targeting guide sequence portion
aagaaagccaaguagcaaac

SEQ ID NO: 6199 - RNA, 20 nt, Artificial Sequence
  SAMD9 targeting guide sequence portion
aagccaaguagcaaaccuuc

SEQ ID NO: 6200 - RNA, 20 nt, Artificial Sequence
  SAMD9 targeting guide sequence portion
aagcuuacaaagaaagccaa

SEQ ID NO: 6201 - RNA, 20 nt, Artificial Sequence
  SAMD9 targeting guide sequence portion
aagguuugcuacuuggcuuu

SEQ ID NO: 6202 - RNA, 20 nt, Artificial Sequence
  SAMD9 targeting guide sequence portion
aaguagcaaaccuucacuuu

SEQ ID NO: 6203 - RNA, 20 nt, Artificial Sequence
  SAMD9 targeting guide sequence portion
aagugaagguuugcuacuug

SEQ ID NO: 6204 - RNA, 20 nt, Artificial Sequence
  SAMD9 targeting guide sequence portion
acaaagaaagccaaguagca

SEQ ID NO: 6205 - RNA, 20 nt, Artificial Sequence
  SAMD9 targeting guide sequence portion
acuuggaaagugaagguuug

SEQ ID NO: 6206 - RNA, 20 nt, Artificial Sequence
  SAMD9 targeting guide sequence portion
acuuggcuuucuuuguaagc

SEQ ID NO: 6207 - RNA, 20 nt, Artificial Sequence
  SAMD9 targeting guide sequence portion
agaaagccaaguagcaaacc

SEQ ID NO: 6208 - RNA, 20 nt, Artificial Sequence
  SAMD9 targeting guide sequence portion
agccaaguagcaaaccuuca

SEQ ID NO: 6209 - RNA, 20 nt, Artificial Sequence
  SAMD9 targeting guide sequence portion
agcuuacaaagaaagccaag

SEQ ID NO: 6210 - RNA, 20 nt, Artificial Sequence
  SAMD9 targeting guide sequence portion
agguuugcuacuuggcuuuc

SEQ ID NO: 6211 - RNA, 20 nt, Artificial Sequence
  SAMD9 targeting guide sequence portion
agugaagguuugcuacuugg

SEQ ID NO: 6212 - RNA, 20 nt, Artificial Sequence
  SAMD9 targeting guide sequence portion
caaagaaagccaaguagcaa

SEQ ID NO: 6213 - RNA, 20 nt, Artificial Sequence
  SAMD9 targeting guide sequence portion
caaagcuuacaaagaaagcc

SEQ ID NO: 6214 - RNA, 20 nt, Artificial Sequence
  SAMD9 targeting guide sequence portion
caaguagcaaaccuucacuu

SEQ ID NO: 6215 - RNA, 20 nt, Artificial Sequence
  SAMD9 targeting guide sequence portion
ccaaguagcaaaccuucacu

SEQ ID NO: 6216 - RNA, 20 nt, Artificial Sequence
  SAMD9 targeting guide sequence portion
cuacuuggcuuucuuuguaa

SEQ ID NO: 6217 - RNA, 20 nt, Artificial Sequence
  SAMD9 targeting guide sequence portion
cuuacaaagaaagccaagua

SEQ ID NO: 6218 - RNA, 20 nt, Artificial Sequence
  SAMD9 targeting guide sequence portion
cuuggaaagugaagguuugc

SEQ ID NO: 6219 - RNA, 20 nt, Artificial Sequence
  SAMD9 targeting guide sequence portion
cuuggcuuucuuuguaagcu

SEQ ID NO: 6220 - RNA, 20 nt, Artificial Sequence
  SAMD9 targeting guide sequence portion
gaaagccaaguagcaaaccu

SEQ ID NO: 6221 - RNA, 20 nt, Artificial Sequence
  SAMD9 targeting guide sequence portion
gaaagugaagguuugcuacu

SEQ ID NO: 6222 - RNA, 20 nt, Artificial Sequence
  SAMD9 targeting guide sequence portion
gaagguuugcuacuuggcuu

SEQ ID NO: 6223 - RNA, 20 nt, Artificial Sequence
  SAMD9 targeting guide sequence portion
gccaaguagcaaaccuucac

SEQ ID NO: 6224 - RNA, 20 nt, Artificial Sequence
  SAMD9 targeting guide sequence portion
gcuacuuggcuuucuuugua

SEQ ID NO: 6225 - RNA, 20 nt, Artificial Sequence
  SAMD9 targeting guide sequence portion
gcuuacaaagaaagccaagu

SEQ ID NO: 6226 - RNA, 20 nt, Artificial Sequence
  SAMD9 targeting guide sequence portion
ggaaagugaagguuugcuac

SEQ ID NO: 6227 - RNA, 20 nt, Artificial Sequence
  SAMD9 targeting guide sequence portion
ggucaaagcuuacaaagaaa

SEQ ID NO: 6228 - RNA, 20 nt, Artificial Sequence
  SAMD9 targeting guide sequence portion
gguuugcuacuuggcuuucu

SEQ ID NO: 6229 - RNA, 20 nt, Artificial Sequence
  SAMD9 targeting guide sequence portion
gucaaagcuuacaaagaaag

SEQ ID NO: 6230 - RNA, 20 nt, Artificial Sequence
  SAMD9 targeting guide sequence portion
gugaagguuugcuacuuggc

SEQ ID NO: 6231 - RNA, 20 nt, Artificial Sequence
  SAMD9 targeting guide sequence portion
guggucaaagcuuacaaaga

SEQ ID NO: 6232 - RNA, 20 nt, Artificial Sequence
  SAMD9 targeting guide sequence portion
guuugcuacuuggcuuucuu

SEQ ID NO: 6233 - RNA, 20 nt, Artificial Sequence
  SAMD9 targeting guide sequence portion
uacaaagaaagccaaguagc

SEQ ID NO: 6234 - RNA, 20 nt, Artificial Sequence
  SAMD9 targeting guide sequence portion
uacuuggcuuucuuuguaag

SEQ ID NO: 6235 - RNA, 20 nt, Artificial Sequence
  SAMD9 targeting guide sequence portion
ucaaagcuuacaaagaaagc

SEQ ID NO: 6236 - RNA, 20 nt, Artificial Sequence
  SAMD9 targeting guide sequence portion
ugaagguuugcuacuuggcu

SEQ ID NO: 6237 - RNA, 20 nt, Artificial Sequence
  SAMD9 targeting guide sequence portion
ugcuacuuggcuuucuuugu

SEQ ID NO: 6238 - RNA, 20 nt, Artificial Sequence
  SAMD9 targeting guide sequence portion
uggaaagugaagguuugcua

SEQ ID NO: 6239 - RNA, 20 nt, Artificial Sequence
  SAMD9 targeting guide sequence portion
uggcuuucuuuguaagcuuu

SEQ ID NO: 6240 - RNA, 20 nt, Artificial Sequence
  SAMD9 targeting guide sequence portion
uggucaaagcuuacaaagaa

SEQ ID NO: 6241 - RNA, 20 nt, Artificial Sequence
  SAMD9 targeting guide sequence portion
uuacaaagaaagccaaguag

SEQ ID NO: 6242 - RNA, 20 nt, Artificial Sequence
  SAMD9 targeting guide sequence portion
uugcuacuuggcuuucuuug

SEQ ID NO: 6243 - RNA, 20 nt, Artificial Sequence
  SAMD9 targeting guide sequence portion
uuggaaagugaagguuugcu

SEQ ID NO: 6244 - RNA, 20 nt, Artificial Sequence
  SAMD9 targeting guide sequence portion
uuggcuuucuuuguaagcuu

SEQ ID NO: 6245 - RNA, 20 nt, Artificial Sequence
  SAMD9 targeting guide sequence portion
uuugcuacuuggcuuucuuu

SEQ ID NO: 6246 - RNA, 21 nt, Artificial Sequence
  SAMD9 targeting guide sequence portion
aaagaaagccaaguagcaaac

SEQ ID NO: 6247 - RNA, 21 nt, Artificial Sequence
  SAMD9 targeting guide sequence portion
aaagccaaguagcaaaccuuc

SEQ ID NO: 6248 - RNA, 21 nt, Artificial Sequence
  SAMD9 targeting guide sequence portion
aaagcuuacaaagaaagccaa

SEQ ID NO: 6249 - RNA, 21 nt, Artificial Sequence
  SAMD9 targeting guide sequence portion
aaagugaagguuugcuacuug

SEQ ID NO: 6250 - RNA, 21 nt, Artificial Sequence
  SAMD9 targeting guide sequence portion
aagaaagccaaguagcaaacc

SEQ ID NO: 6251 - RNA, 21 nt, Artificial Sequence
  SAMD9 targeting guide sequence portion
aagccaaguagcaaaccuuca

SEQ ID NO: 6252 - RNA, 21 nt, Artificial Sequence
  SAMD9 targeting guide sequence portion
aagcuuacaaagaaagccaag

SEQ ID NO: 6253 - RNA, 21 nt, Artificial Sequence
  SAMD9 targeting guide sequence portion
aagguuugcuacuuggcuuuc

SEQ ID NO: 6254 - RNA, 21 nt, Artificial Sequence
  SAMD9 targeting guide sequence portion
aaguagcaaaccuucacuuuc

SEQ ID NO: 6255 - RNA, 21 nt, Artificial Sequence
  SAMD9 targeting guide sequence portion
aagugaagguuugcuacuugg

SEQ ID NO: 6256 - RNA, 21 nt, Artificial Sequence
  SAMD9 targeting guide sequence portion
acaaagaaagccaaguagcaa

SEQ ID NO: 6257 - RNA, 21 nt, Artificial Sequence
  SAMD9 targeting guide sequence portion
acuuggaaagugaagguuugc

SEQ ID NO: 6258 - RNA, 21 nt, Artificial Sequence
  SAMD9 targeting guide sequence portion
acuuggcuuucuuuguaagcu

SEQ ID NO: 6259 - RNA, 21 nt, Artificial Sequence
  SAMD9 targeting guide sequence portion
agaaagccaaguagcaaaccu

SEQ ID NO: 6260 - RNA, 21 nt, Artificial Sequence
  SAMD9 targeting guide sequence portion
agccaaguagcaaaccuucac

SEQ ID NO: 6261 - RNA, 21 nt, Artificial Sequence
  SAMD9 targeting guide sequence portion
agcuuacaaagaaagccaagu

SEQ ID NO: 6262 - RNA, 21 nt, Artificial Sequence
  SAMD9 targeting guide sequence portion
agguuugcuacuuggcuuucu

SEQ ID NO: 6263 - RNA, 21 nt, Artificial Sequence
  SAMD9 targeting guide sequence portion
agugaagguuugcuacuuggc

SEQ ID NO: 6264 - RNA, 21 nt, Artificial Sequence
  SAMD9 targeting guide sequence portion
aguggucaaagcuuacaaaga

SEQ ID NO: 6265 - RNA, 21 nt, Artificial Sequence
  SAMD9 targeting guide sequence portion
caaagaaagccaaguagcaaa

SEQ ID NO: 6266 - RNA, 21 nt, Artificial Sequence
  SAMD9 targeting guide sequence portion
caaagcuuacaaagaaagcca

SEQ ID NO: 6267 - RNA, 21 nt, Artificial Sequence
  SAMD9 targeting guide sequence portion
caaguagcaaaccuucacuuu

SEQ ID NO: 6268 - RNA, 21 nt, Artificial Sequence
  SAMD9 targeting guide sequence portion
cacuuggaaagugaagguuug

SEQ ID NO: 6269 - RNA, 21 nt, Artificial Sequence
  SAMD9 targeting guide sequence portion
ccaaguagcaaaccuucacuu

SEQ ID NO: 6270 - RNA, 21 nt, Artificial Sequence
  SAMD9 targeting guide sequence portion
cuacuuggcuuucuuuguaag

SEQ ID NO: 6271 - RNA, 21 nt, Artificial Sequence
  SAMD9 targeting guide sequence portion
cuuacaaagaaagccaaguag

SEQ ID NO: 6272 - RNA, 21 nt, Artificial Sequence
  SAMD9 targeting guide sequence portion
cuuggaaagugaagguuugcu

SEQ ID NO: 6273 - RNA, 21 nt, Artificial Sequence
  SAMD9 targeting guide sequence portion
cuuggcuuucuuuguaagcuu

SEQ ID NO: 6274 - RNA, 21 nt, Artificial Sequence
  SAMD9 targeting guide sequence portion
gaaagccaaguagcaaaccuu

SEQ ID NO: 6275 - RNA, 21 nt, Artificial Sequence
  SAMD9 targeting guide sequence portion
gaaagugaagguuugcuacuu

SEQ ID NO: 6276 - RNA, 21 nt, Artificial Sequence
  SAMD9 targeting guide sequence portion
gaagguuugcuacuuggcuuu

SEQ ID NO: 6277 - RNA, 21 nt, Artificial Sequence
  SAMD9 targeting guide sequence portion
gccaaguagcaaaccuucacu

SEQ ID NO: 6278 - RNA, 21 nt, Artificial Sequence
  SAMD9 targeting guide sequence portion
gcuacuuggcuuucuuuguaa

SEQ ID NO: 6279 - RNA, 21 nt, Artificial Sequence
  SAMD9 targeting guide sequence portion
gcuuacaaagaaagccaagua

SEQ ID NO: 6280 - RNA, 21 nt, Artificial Sequence
  SAMD9 targeting guide sequence portion
ggaaagugaagguuugcuacu

SEQ ID NO: 6281 - RNA, 21 nt, Artificial Sequence
  SAMD9 targeting guide sequence portion
ggucaaagcuuacaaagaaag

SEQ ID NO: 6282 - RNA, 21 nt, Artificial Sequence
  SAMD9 targeting guide sequence portion
gguuugcuacuuggcuuucuu

SEQ ID NO: 6283 - RNA, 21 nt, Artificial Sequence
  SAMD9 targeting guide sequence portion
gucaaagcuuacaaagaaagc

SEQ ID NO: 6284 - RNA, 21 nt, Artificial Sequence
  SAMD9 targeting guide sequence portion
gugaagguuugcuacuuggcu

SEQ ID NO: 6285 - RNA, 21 nt, Artificial Sequence
  SAMD9 targeting guide sequence portion
guggucaaagcuuacaaagaa

SEQ ID NO: 6286 - RNA, 21 nt, Artificial Sequence
  SAMD9 targeting guide sequence portion
guuugcuacuuggcuuucuuu

SEQ ID NO: 6287 - RNA, 21 nt, Artificial Sequence
  SAMD9 targeting guide sequence portion
uacaaagaaagccaaguagca

SEQ ID NO: 6288 - RNA, 21 nt, Artificial Sequence
  SAMD9 targeting guide sequence portion
uacuuggcuuucuuuguaagc

SEQ ID NO: 6289 - RNA, 21 nt, Artificial Sequence
  SAMD9 targeting guide sequence portion
ucaaagcuuacaaagaaagcc

SEQ ID NO: 6290 - RNA, 21 nt, Artificial Sequence
  SAMD9 targeting guide sequence portion
ugaagguuugcuacuuggcuu

SEQ ID NO: 6291 - RNA, 21 nt, Artificial Sequence
  SAMD9 targeting guide sequence portion
ugcuacuuggcuuucuuugua

SEQ ID NO: 6292 - RNA, 21 nt, Artificial Sequence
  SAMD9 targeting guide sequence portion
uggaaagugaagguuugcuac

SEQ ID NO: 6293 - RNA, 21 nt, Artificial Sequence
  SAMD9 targeting guide sequence portion
uggcuuucuuuguaagcuuug

SEQ ID NO: 6294 - RNA, 21 nt, Artificial Sequence
  SAMD9 targeting guide sequence portion
uggucaaagcuuacaaagaaa

SEQ ID NO: 6295 - RNA, 21 nt, Artificial Sequence
  SAMD9 targeting guide sequence portion
uuacaaagaaagccaaguagc

SEQ ID NO: 6296 - RNA, 21 nt, Artificial Sequence
  SAMD9 targeting guide sequence portion
uugcuacuuggcuuucuuugu

SEQ ID NO: 6297 - RNA, 21 nt, Artificial Sequence
  SAMD9 targeting guide sequence portion
uuggaaagugaagguuugcua

SEQ ID NO: 6298 - RNA, 21 nt, Artificial Sequence
  SAMD9 targeting guide sequence portion
uuggcuuucuuuguaagcuuu

SEQ ID NO: 6299 - RNA, 21 nt, Artificial Sequence
  SAMD9 targeting guide sequence portion
uuugcuacuuggcuuucuuug

SEQ ID NO: 6300 - RNA, 22 nt, Artificial Sequence
  SAMD9 targeting guide sequence portion
aaagaaagccaaguagcaaacc

SEQ ID NO: 6301 - RNA, 22 nt, Artificial Sequence
  SAMD9 targeting guide sequence portion
aaagccaaguagcaaaccuuca

SEQ ID NO: 6302 - RNA, 22 nt, Artificial Sequence
  SAMD9 targeting guide sequence portion
aaagcuuacaaagaaagccaag

SEQ ID NO: 6303 - RNA, 22 nt, Artificial Sequence
  SAMD9 targeting guide sequence portion
aaagugaagguuugcuacuugg

SEQ ID NO: 6304 - RNA, 22 nt, Artificial Sequence
  SAMD9 targeting guide sequence portion
aagaaagccaaguagcaaaccu

SEQ ID NO: 6305 - RNA, 22 nt, Artificial Sequence
  SAMD9 targeting guide sequence portion
aagccaaguagcaaaccuucac

SEQ ID NO: 6306 - RNA, 22 nt, Artificial Sequence
  SAMD9 targeting guide sequence portion
aagcuuacaaagaaagccaagu

SEQ ID NO: 6307 - RNA, 22 nt, Artificial Sequence
  SAMD9 targeting guide sequence portion
aagguuugcuacuuggcuuucu

SEQ ID NO: 6308 - RNA, 22 nt, Artificial Sequence
  SAMD9 targeting guide sequence portion
aaguagcaaaccuucacuuucc

SEQ ID NO: 6309 - RNA, 22 nt, Artificial Sequence
  SAMD9 targeting guide sequence portion
aagugaagguuugcuacuuggc

SEQ ID NO: 6310 - RNA, 22 nt, Artificial Sequence
  SAMD9 targeting guide sequence portion
acaaagaaagccaaguagcaaa

SEQ ID NO: 6311 - RNA, 22 nt, Artificial Sequence
  SAMD9 targeting guide sequence portion
acacuuggaaagugaagguuug

SEQ ID NO: 6312 - RNA, 22 nt, Artificial Sequence
  SAMD9 targeting guide sequence portion
acuuggaaagugaagguuugcu

SEQ ID NO: 6313 - RNA, 22 nt, Artificial Sequence
  SAMD9 targeting guide sequence portion
acuuggcuuucuuuguaagcuu

SEQ ID NO: 6314 - RNA, 22 nt, Artificial Sequence
  SAMD9 targeting guide sequence portion
agaaagccaaguagcaaaccuu

SEQ ID NO: 6315 - RNA, 22 nt, Artificial Sequence
  SAMD9 targeting guide sequence portion
agccaaguagcaaaccuucacu

SEQ ID NO: 6316 - RNA, 22 nt, Artificial Sequence
  SAMD9 targeting guide sequence portion
agcuuacaaagaaagccaagua

SEQ ID NO: 6317 - RNA, 22 nt, Artificial Sequence
  SAMD9 targeting guide sequence portion
agguuugcuacuuggcuuucuu

SEQ ID NO: 6318 - RNA, 22 nt, Artificial Sequence
  SAMD9 targeting guide sequence portion
agugaagguuugcuacuuggcu

SEQ ID NO: 6319 - RNA, 22 nt, Artificial Sequence
  SAMD9 targeting guide sequence portion
aguggucaaagcuuacaaagaa

SEQ ID NO: 6320 - RNA, 22 nt, Artificial Sequence
  SAMD9 targeting guide sequence portion
caaagaaagccaaguagcaaac

SEQ ID NO: 6321 - RNA, 22 nt, Artificial Sequence
  SAMD9 targeting guide sequence portion
caaagcuuacaaagaaagccaa

SEQ ID NO: 6322 - RNA, 22 nt, Artificial Sequence
  SAMD9 targeting guide sequence portion
caaguagcaaaccuucacuuuc

SEQ ID NO: 6323 - RNA, 22 nt, Artificial Sequence
  SAMD9 targeting guide sequence portion
cacuuggaaagugaagguuugc

SEQ ID NO: 6324 - RNA, 22 nt, Artificial Sequence
  SAMD9 targeting guide sequence portion
ccaaguagcaaaccuucacuuu

SEQ ID NO: 6325 - RNA, 22 nt, Artificial Sequence
  SAMD9 targeting guide sequence portion
cuacuuggcuuucuuuguaagc

SEQ ID NO: 6326 - RNA, 22 nt, Artificial Sequence
  SAMD9 targeting guide sequence portion
cuuacaaagaaagccaaguagc

SEQ ID NO: 6327 - RNA, 22 nt, Artificial Sequence
  SAMD9 targeting guide sequence portion
cuuggaaagugaagguuugcua

SEQ ID NO: 6328 - RNA, 22 nt, Artificial Sequence
  SAMD9 targeting guide sequence portion
cuuggcuuucuuuguaagcuuu

SEQ ID NO: 6329 - RNA, 22 nt, Artificial Sequence
  SAMD9 targeting guide sequence portion
gaaagccaaguagcaaaccuuc

SEQ ID NO: 6330 - RNA, 22 nt, Artificial Sequence
  SAMD9 targeting guide sequence portion
gaaagugaagguuugcuacuug

SEQ ID NO: 6331 - RNA, 22 nt, Artificial Sequence
  SAMD9 targeting guide sequence portion
gaagguuugcuacuuggcuuuc

SEQ ID NO: 6332 - RNA, 22 nt, Artificial Sequence
  SAMD9 targeting guide sequence portion
gaguggucaaagcuuacaaaga

SEQ ID NO: 6333 - RNA, 22 nt, Artificial Sequence
  SAMD9 targeting guide sequence portion
gccaaguagcaaaccuucacuu

SEQ ID NO: 6334 - RNA, 22 nt, Artificial Sequence
  SAMD9 targeting guide sequence portion
gcuacuuggcuuucuuuguaag

SEQ ID NO: 6335 - RNA, 22 nt, Artificial Sequence
  SAMD9 targeting guide sequence portion
gcuuacaaagaaagccaaguag

SEQ ID NO: 6336 - RNA, 22 nt, Artificial Sequence
  SAMD9 targeting guide sequence portion
ggaaagugaagguuugcuacuu

SEQ ID NO: 6337 - RNA, 22 nt, Artificial Sequence
  SAMD9 targeting guide sequence portion
ggucaaagcuuacaaagaaagc

SEQ ID NO: 6338 - RNA, 22 nt, Artificial Sequence
  SAMD9 targeting guide sequence portion
gguuugcuacuuggcuuucuuu

SEQ ID NO: 6339 - RNA, 22 nt, Artificial Sequence
  SAMD9 targeting guide sequence portion
gucaaagcuuacaaagaaagcc

SEQ ID NO: 6340 - RNA, 22 nt, Artificial Sequence
  SAMD9 targeting guide sequence portion
gugaagguuugcuacuuggcuu

SEQ ID NO: 6341 - RNA, 22 nt, Artificial Sequence
  SAMD9 targeting guide sequence portion
guggucaaagcuuacaaagaaa

SEQ ID NO: 6342 - RNA, 22 nt, Artificial Sequence
  SAMD9 targeting guide sequence portion
guuugcuacuuggcuuucuuug

SEQ ID NO: 6343 - RNA, 22 nt, Artificial Sequence
  SAMD9 targeting guide sequence portion
uacaaagaaagccaaguagcaa

SEQ ID NO: 6344 - RNA, 22 nt, Artificial Sequence
  SAMD9 targeting guide sequence portion
uacuuggcuuucuuuguaagcu

SEQ ID NO: 6345 - RNA, 22 nt, Artificial Sequence
  SAMD9 targeting guide sequence portion
ucaaagcuuacaaagaaagcca

SEQ ID NO: 6346 - RNA, 22 nt, Artificial Sequence
  SAMD9 targeting guide sequence portion
ugaagguuugcuacuuggcuuu

SEQ ID NO: 6347 - RNA, 22 nt, Artificial Sequence
  SAMD9 targeting guide sequence portion
ugcuacuuggcuuucuuuguaa

SEQ ID NO: 6348 - RNA, 22 nt, Artificial Sequence
  SAMD9 targeting guide sequence portion
uggaaagugaagguuugcuacu

SEQ ID NO: 6349 - RNA, 22 nt, Artificial Sequence
  SAMD9 targeting guide sequence portion
uggcuuucuuuguaagcuuuga

SEQ ID NO: 6350 - RNA, 22 nt, Artificial Sequence
  SAMD9 targeting guide sequence portion
uggucaaagcuuacaaagaaag

SEQ ID NO: 6351 - RNA, 22 nt, Artificial Sequence
  SAMD9 targeting guide sequence portion
uuacaaagaaagccaaguagca

SEQ ID NO: 6352 - RNA, 22 nt, Artificial Sequence
  SAMD9 targeting guide sequence portion
uugcuacuuggcuuucuuugua

SEQ ID NO: 6353 - RNA, 22 nt, Artificial Sequence
  SAMD9 targeting guide sequence portion
uuggaaagugaagguuugcuac

SEQ ID NO: 6354 - RNA, 22 nt, Artificial Sequence
  SAMD9 targeting guide sequence portion
uuggcuuucuuuguaagcuuug

SEQ ID NO: 6355 - RNA, 22 nt, Artificial Sequence
  SAMD9 targeting guide sequence portion
uuugcuacuuggcuuucuuugu

SEQ ID NO: 6356 - RNA, 20 nt, Artificial Sequence
  SAMD9 targeting guide sequence portion
aaaucaacuuuauuuuucgu

SEQ ID NO: 6357 - RNA, 20 nt, Artificial Sequence
  SAMD9 targeting guide sequence portion
aacuuuauuuuucguagugu

SEQ ID NO: 6358 - RNA, 20 nt, Artificial Sequence
  SAMD9 targeting guide sequence portion
aaggacacuacgaaaaauaa

SEQ ID NO: 6359 - RNA, 20 nt, Artificial Sequence
  SAMD9 targeting guide sequence portion
aaucaacuuuauuuuucgua

SEQ ID NO: 6360 - RNA, 20 nt, Artificial Sequence
  SAMD9 targeting guide sequence portion
acacuacgaaaaauaaaguu

SEQ ID NO: 6361 - RNA, 20 nt, Artificial Sequence
  SAMD9 targeting guide sequence portion
accagcucuaaggacacuac

SEQ ID NO: 6362 - RNA, 20 nt, Artificial Sequence
  SAMD9 targeting guide sequence portion
acuacgaaaaauaaaguuga

SEQ ID NO: 6363 - RNA, 20 nt, Artificial Sequence
  SAMD9 targeting guide sequence portion
acuuuauuuuucguaguguc

SEQ ID NO: 6364 - RNA, 20 nt, Artificial Sequence
  SAMD9 targeting guide sequence portion
agaugggaccagcucuaagg

SEQ ID NO: 6365 - RNA, 20 nt, Artificial Sequence
  SAMD9 targeting guide sequence portion
agcucuaaggacacuacgaa

SEQ ID NO: 6366 - RNA, 20 nt, Artificial Sequence
  SAMD9 targeting guide sequence portion
aggacacuacgaaaaauaaa

SEQ ID NO: 6367 - RNA, 20 nt, Artificial Sequence
  SAMD9 targeting guide sequence portion
aguguccuuagagcuggucc

SEQ ID NO: 6368 - RNA, 20 nt, Artificial Sequence
  SAMD9 targeting guide sequence portion
aucaacuuuauuuuucguag

SEQ ID NO: 6369 - RNA, 20 nt, Artificial Sequence
  SAMD9 targeting guide sequence portion
augggaccagcucuaaggac

SEQ ID NO: 6370 - RNA, 20 nt, Artificial Sequence
  SAMD9 targeting guide sequence portion
auuuuucguaguguccuuag

SEQ ID NO: 6371 - RNA, 20 nt, Artificial Sequence
  SAMD9 targeting guide sequence portion
caacuuuauuuuucguagug

SEQ ID NO: 6372 - RNA, 20 nt, Artificial Sequence
  SAMD9 targeting guide sequence portion
cacuacgaaaaauaaaguug

SEQ ID NO: 6373 - RNA, 20 nt, Artificial Sequence
  SAMD9 targeting guide sequence portion
cagcucuaaggacacuacga

SEQ ID NO: 6374 - RNA, 20 nt, Artificial Sequence
  SAMD9 targeting guide sequence portion
ccagcucuaaggacacuacg

SEQ ID NO: 6375 - RNA, 20 nt, Artificial Sequence
  SAMD9 targeting guide sequence portion
cgagaugggaccagcucuaa

SEQ ID NO: 6376 - RNA, 20 nt, Artificial Sequence
  SAMD9 targeting guide sequence portion
cguaguguccuuagagcugg

SEQ ID NO: 6377 - RNA, 20 nt, Artificial Sequence
  SAMD9 targeting guide sequence portion
cuaaggacacuacgaaaaau

SEQ ID NO: 6378 - RNA, 20 nt, Artificial Sequence
  SAMD9 targeting guide sequence portion
cuacgaaaaauaaaguugau

SEQ ID NO: 6379 - RNA, 20 nt, Artificial Sequence
  SAMD9 targeting guide sequence portion
cucuaaggacacuacgaaaa

SEQ ID NO: 6380 - RNA, 20 nt, Artificial Sequence
  SAMD9 targeting guide sequence portion
cugaaaucaacuuuauuuuu

SEQ ID NO: 6381 - RNA, 20 nt, Artificial Sequence
  SAMD9 targeting guide sequence portion
cuuuauuuuucguagugucc

SEQ ID NO: 6382 - RNA, 20 nt, Artificial Sequence
  SAMD9 targeting guide sequence portion
gaaaucaacuuuauuuuucg

SEQ ID NO: 6383 - RNA, 20 nt, Artificial Sequence
  SAMD9 targeting guide sequence portion
gacacuacgaaaaauaaagu

SEQ ID NO: 6384 - RNA, 20 nt, Artificial Sequence
  SAMD9 targeting guide sequence portion
gaccagcucuaaggacacua

SEQ ID NO: 6385 - RNA, 20 nt, Artificial Sequence
  SAMD9 targeting guide sequence portion
gagaugggaccagcucuaag

SEQ ID NO: 6386 - RNA, 20 nt, Artificial Sequence
  SAMD9 targeting guide sequence portion
gaugggaccagcucuaagga

SEQ ID NO: 6387 - RNA, 20 nt, Artificial Sequence
  SAMD9 targeting guide sequence portion
gcucuaaggacacuacgaaa

SEQ ID NO: 6388 - RNA, 20 nt, Artificial Sequence
  SAMD9 targeting guide sequence portion
ggacacuacgaaaaauaaag

SEQ ID NO: 6389 - RNA, 20 nt, Artificial Sequence
  SAMD9 targeting guide sequence portion
ggaccagcucuaaggacacu

SEQ ID NO: 6390 - RNA, 20 nt, Artificial Sequence
  SAMD9 targeting guide sequence portion
gggaccagcucuaaggacac

SEQ ID NO: 6391 - RNA, 20 nt, Artificial Sequence
  SAMD9 targeting guide sequence portion
guaguguccuuagagcuggu

SEQ ID NO: 6392 - RNA, 20 nt, Artificial Sequence
  SAMD9 targeting guide sequence portion
guguccuuagagcugguccc

SEQ ID NO: 6393 - RNA, 20 nt, Artificial Sequence
  SAMD9 targeting guide sequence portion
uaaggacacuacgaaaaaua

SEQ ID NO: 6394 - RNA, 20 nt, Artificial Sequence
  SAMD9 targeting guide sequence portion
uaguguccuuagagcugguc

SEQ ID NO: 6395 - RNA, 20 nt, Artificial Sequence
  SAMD9 targeting guide sequence portion
uauuuuucguaguguccuua

SEQ ID NO: 6396 - RNA, 20 nt, Artificial Sequence
  SAMD9 targeting guide sequence portion
ucaacuuuauuuuucguagu

SEQ ID NO: 6397 - RNA, 20 nt, Artificial Sequence
  SAMD9 targeting guide sequence portion
ucguaguguccuuagagcug

SEQ ID NO: 6398 - RNA, 20 nt, Artificial Sequence
  SAMD9 targeting guide sequence portion
ucuaaggacacuacgaaaaa

SEQ ID NO: 6399 - RNA, 20 nt, Artificial Sequence
  SAMD9 targeting guide sequence portion
ucugaaaucaacuuuauuuu

SEQ ID NO: 6400 - RNA, 20 nt, Artificial Sequence
  SAMD9 targeting guide sequence portion
ugaaaucaacuuuauuuuuc

SEQ ID NO: 6401 - RNA, 20 nt, Artificial Sequence
  SAMD9 targeting guide sequence portion
ugggaccagcucuaaggaca

SEQ ID NO: 6402 - RNA, 20 nt, Artificial Sequence
  SAMD9 targeting guide sequence portion
uuauuuuucguaguguccuu

SEQ ID NO: 6403 - RNA, 20 nt, Artificial Sequence
  SAMD9 targeting guide sequence portion
uucguaguguccuuagagcu

SEQ ID NO: 6404 - RNA, 20 nt, Artificial Sequence
  SAMD9 targeting guide sequence portion
uuuauuuuucguaguguccu

SEQ ID NO: 6405 - RNA, 20 nt, Artificial Sequence
  SAMD9 targeting guide sequence portion
uuucguaguguccuuagagc

SEQ ID NO: 6406 - RNA, 20 nt, Artificial Sequence
  SAMD9 targeting guide sequence portion
uuuucguaguguccuuagag

SEQ ID NO: 6407 - RNA, 20 nt, Artificial Sequence
  SAMD9 targeting guide sequence portion
uuuuucguaguguccuuaga

SEQ ID NO: 6408 - RNA, 21 nt, Artificial Sequence
  SAMD9 targeting guide sequence portion
aacuuuauuuuucguaguguc

SEQ ID NO: 6409 - RNA, 21 nt, Artificial Sequence
  SAMD9 targeting guide sequence portion
aaggacacuacgaaaaauaaa

SEQ ID NO: 6410 - RNA, 21 nt, Artificial Sequence
  SAMD9 targeting guide sequence portion
aaucaacuuuauuuuucguag

SEQ ID NO: 6411 - RNA, 21 nt, Artificial Sequence
  SAMD9 targeting guide sequence portion
acacuacgaaaaauaaaguug

SEQ ID NO: 6412 - RNA, 21 nt, Artificial Sequence
  SAMD9 targeting guide sequence portion
accagcucuaaggacacuacg

SEQ ID NO: 6413 - RNA, 21 nt, Artificial Sequence
  SAMD9 targeting guide sequence portion
acuacgaaaaauaaaguugau

SEQ ID NO: 6414 - RNA, 21 nt, Artificial Sequence
  SAMD9 targeting guide sequence portion
acuuuauuuuucguagugucc

SEQ ID NO: 6415 - RNA, 21 nt, Artificial Sequence
  SAMD9 targeting guide sequence portion
agaugggaccagcucuaagga

SEQ ID NO: 6416 - RNA, 21 nt, Artificial Sequence
  SAMD9 targeting guide sequence portion
agcucuaaggacacuacgaaa

SEQ ID NO: 6417 - RNA, 21 nt, Artificial Sequence
  SAMD9 targeting guide sequence portion
aggacacuacgaaaaauaaag

SEQ ID NO: 6418 - RNA, 21 nt, Artificial Sequence
  SAMD9 targeting guide sequence portion
aguguccuuagagcugguccc

SEQ ID NO: 6419 - RNA, 21 nt, Artificial Sequence
  SAMD9 targeting guide sequence portion
aucaacuuuauuuuucguagu

SEQ ID NO: 6420 - RNA, 21 nt, Artificial Sequence
  SAMD9 targeting guide sequence portion
augggaccagcucuaaggaca

SEQ ID NO: 6421 - RNA, 21 nt, Artificial Sequence
  SAMD9 targeting guide sequence portion
auuuuucguaguguccuuaga

SEQ ID NO: 6422 - RNA, 21 nt, Artificial Sequence
  SAMD9 targeting guide sequence portion
caacuuuauuuuucguagugu

SEQ ID NO: 6423 - RNA, 21 nt, Artificial Sequence
  SAMD9 targeting guide sequence portion
cacuacgaaaaauaaaguuga

SEQ ID NO: 6424 - RNA, 21 nt, Artificial Sequence
  SAMD9 targeting guide sequence portion
cagcucuaaggacacuacgaa

SEQ ID NO: 6425 - RNA, 21 nt, Artificial Sequence
  SAMD9 targeting guide sequence portion
ccagcucuaaggacacuacga

SEQ ID NO: 6426 - RNA, 21 nt, Artificial Sequence
  SAMD9 targeting guide sequence portion
cgagaugggaccagcucuaag

SEQ ID NO: 6427 - RNA, 21 nt, Artificial Sequence
  SAMD9 targeting guide sequence portion
cguaguguccuuagagcuggu

SEQ ID NO: 6428 - RNA, 21 nt, Artificial Sequence
  SAMD9 targeting guide sequence portion
cuaaggacacuacgaaaaaua

SEQ ID NO: 6429 - RNA, 21 nt, Artificial Sequence
  SAMD9 targeting guide sequence portion
cuacgaaaaauaaaguugauu

SEQ ID NO: 6430 - RNA, 21 nt, Artificial Sequence
  SAMD9 targeting guide sequence portion
cucuaaggacacuacgaaaaa

SEQ ID NO: 6431 - RNA, 21 nt, Artificial Sequence
  SAMD9 targeting guide sequence portion
cucugaaaucaacuuuauuuu

SEQ ID NO: 6432 - RNA, 21 nt, Artificial Sequence
  SAMD9 targeting guide sequence portion
cugaaaucaacuuuauuuuuc

SEQ ID NO: 6433 - RNA, 21 nt, Artificial Sequence
  SAMD9 targeting guide sequence portion
cuuuauuuuucguaguguccu

SEQ ID NO: 6434 - RNA, 21 nt, Artificial Sequence
  SAMD9 targeting guide sequence portion
gaaaucaacuuuauuuuucgu

SEQ ID NO: 6435 - RNA, 21 nt, Artificial Sequence
  SAMD9 targeting guide sequence portion
gacacuacgaaaaauaaaguu

SEQ ID NO: 6436 - RNA, 21 nt, Artificial Sequence
  SAMD9 targeting guide sequence portion
gaccagcucuaaggacacuac

SEQ ID NO: 6437 - RNA, 21 nt, Artificial Sequence
  SAMD9 targeting guide sequence portion
gagaugggaccagcucuaagg

SEQ ID NO: 6438 - RNA, 21 nt, Artificial Sequence
  SAMD9 targeting guide sequence portion
gaugggaccagcucuaaggac

SEQ ID NO: 6439 - RNA, 21 nt, Artificial Sequence
  SAMD9 targeting guide sequence portion
gcgagaugggaccagcucuaa

SEQ ID NO: 6440 - RNA, 21 nt, Artificial Sequence
  SAMD9 targeting guide sequence portion
gcucuaaggacacuacgaaaa

SEQ ID NO: 6441 - RNA, 21 nt, Artificial Sequence
  SAMD9 targeting guide sequence portion
ggacacuacgaaaaauaaagu

SEQ ID NO: 6442 - RNA, 21 nt, Artificial Sequence
  SAMD9 targeting guide sequence portion
ggaccagcucuaaggacacua

SEQ ID NO: 6443 - RNA, 21 nt, Artificial Sequence
  SAMD9 targeting guide sequence portion
gggaccagcucuaaggacacu

SEQ ID NO: 6444 - RNA, 21 nt, Artificial Sequence
  SAMD9 targeting guide sequence portion
guaguguccuuagagcugguc

SEQ ID NO: 6445 - RNA, 21 nt, Artificial Sequence
  SAMD9 targeting guide sequence portion
guguccuuagagcugguccca

SEQ ID NO: 6446 - RNA, 21 nt, Artificial Sequence
  SAMD9 targeting guide sequence portion
uaaggacacuacgaaaaauaa

SEQ ID NO: 6447 - RNA, 21 nt, Artificial Sequence
  SAMD9 targeting guide sequence portion
uaguguccuuagagcuggucc

SEQ ID NO: 6448 - RNA, 21 nt, Artificial Sequence
  SAMD9 targeting guide sequence portion
uauuuuucguaguguccuuag

SEQ ID NO: 6449 - RNA, 21 nt, Artificial Sequence
  SAMD9 targeting guide sequence portion
ucaacuuuauuuuucguagug

SEQ ID NO: 6450 - RNA, 21 nt, Artificial Sequence
  SAMD9 targeting guide sequence portion
ucguaguguccuuagagcugg

SEQ ID NO: 6451 - RNA, 21 nt, Artificial Sequence
  SAMD9 targeting guide sequence portion
ucuaaggacacuacgaaaaau

SEQ ID NO: 6452 - RNA, 21 nt, Artificial Sequence
  SAMD9 targeting guide sequence portion
ugaaaucaacuuuauuuuucg

SEQ ID NO: 6453 - RNA, 21 nt, Artificial Sequence
  SAMD9 targeting guide sequence portion
ugggaccagcucuaaggacac

SEQ ID NO: 6454 - RNA, 21 nt, Artificial Sequence
  SAMD9 targeting guide sequence portion
uuauuuuucguaguguccuua

SEQ ID NO: 6455 - RNA, 21 nt, Artificial Sequence
  SAMD9 targeting guide sequence portion
uucguaguguccuuagagcug

SEQ ID NO: 6456 - RNA, 21 nt, Artificial Sequence
  SAMD9 targeting guide sequence portion
uuuauuuuucguaguguccuu

SEQ ID NO: 6457 - RNA, 21 nt, Artificial Sequence
  SAMD9 targeting guide sequence portion
uuucguaguguccuuagagcu

SEQ ID NO: 6458 - RNA, 21 nt, Artificial Sequence
  SAMD9 targeting guide sequence portion
uuuucguaguguccuuagagc

SEQ ID NO: 6459 - RNA, 21 nt, Artificial Sequence
  SAMD9 targeting guide sequence portion
uuuuucguaguguccuuagag

SEQ ID NO: 6460 - RNA, 22 nt, Artificial Sequence
  SAMD9 targeting guide sequence portion
aaaucaacuuuauuuuucguag

SEQ ID NO: 6461 - RNA, 22 nt, Artificial Sequence
  SAMD9 targeting guide sequence portion
aacuuuauuuuucguagugucc

SEQ ID NO: 6462 - RNA, 22 nt, Artificial Sequence
  SAMD9 targeting guide sequence portion
aaggacacuacgaaaaauaaag

SEQ ID NO: 6463 - RNA, 22 nt, Artificial Sequence
  SAMD9 targeting guide sequence portion
aaucaacuuuauuuuucguagu

SEQ ID NO: 6464 - RNA, 22 nt, Artificial Sequence
  SAMD9 targeting guide sequence portion
acacuacgaaaaauaaaguuga

SEQ ID NO: 6465 - RNA, 22 nt, Artificial Sequence
  SAMD9 targeting guide sequence portion
accagcucuaaggacacuacga

SEQ ID NO: 6466 - RNA, 22 nt, Artificial Sequence
  SAMD9 targeting guide sequence portion
acuacgaaaaauaaaguugauu

SEQ ID NO: 6467 - RNA, 22 nt, Artificial Sequence
  SAMD9 targeting guide sequence portion
acuuuauuuuucguaguguccu

SEQ ID NO: 6468 - RNA, 22 nt, Artificial Sequence
  SAMD9 targeting guide sequence portion
agaugggaccagcucuaaggac

SEQ ID NO: 6469 - RNA, 22 nt, Artificial Sequence
  SAMD9 targeting guide sequence portion
agcucuaaggacacuacgaaaa

SEQ ID NO: 6470 - RNA, 22 nt, Artificial Sequence
  SAMD9 targeting guide sequence portion
aggacacuacgaaaaauaaagu

SEQ ID NO: 6471 - RNA, 22 nt, Artificial Sequence
  SAMD9 targeting guide sequence portion
aguguccuuagagcugguccca

SEQ ID NO: 6472 - RNA, 22 nt, Artificial Sequence
  SAMD9 targeting guide sequence portion
aucaacuuuauuuuucguagug

SEQ ID NO: 6473 - RNA, 22 nt, Artificial Sequence
  SAMD9 targeting guide sequence portion
augggaccagcucuaaggacac

SEQ ID NO: 6474 - RNA, 22 nt, Artificial Sequence
  SAMD9 targeting guide sequence portion
auuuuucguaguguccuuagag

SEQ ID NO: 6475 - RNA, 22 nt, Artificial Sequence
  SAMD9 targeting guide sequence portion
caacuuuauuuuucguaguguc

SEQ ID NO: 6476 - RNA, 22 nt, Artificial Sequence
  SAMD9 targeting guide sequence portion
cacuacgaaaaauaaaguugau

SEQ ID NO: 6477 - RNA, 22 nt, Artificial Sequence
  SAMD9 targeting guide sequence portion
cagcucuaaggacacuacgaaa

SEQ ID NO: 6478 - RNA, 22 nt, Artificial Sequence
  SAMD9 targeting guide sequence portion
ccagcucuaaggacacuacgaa

SEQ ID NO: 6479 - RNA, 22 nt, Artificial Sequence
  SAMD9 targeting guide sequence portion
cgagaugggaccagcucuaagg

SEQ ID NO: 6480 - RNA, 22 nt, Artificial Sequence
  SAMD9 targeting guide sequence portion
cguaguguccuuagagcugguc

SEQ ID NO: 6481 - RNA, 22 nt, Artificial Sequence
  SAMD9 targeting guide sequence portion
cuaaggacacuacgaaaaauaa

SEQ ID NO: 6482 - RNA, 22 nt, Artificial Sequence
  SAMD9 targeting guide sequence portion
cuacgaaaaauaaaguugauuu

SEQ ID NO: 6483 - RNA, 22 nt, Artificial Sequence
  SAMD9 targeting guide sequence portion
cucuaaggacacuacgaaaaau

SEQ ID NO: 6484 - RNA, 22 nt, Artificial Sequence
  SAMD9 targeting guide sequence portion
cucugaaaucaacuuuauuuuu

SEQ ID NO: 6485 - RNA, 22 nt, Artificial Sequence
  SAMD9 targeting guide sequence portion
cugaaaucaacuuuauuuuucg

SEQ ID NO: 6486 - RNA, 22 nt, Artificial Sequence
  SAMD9 targeting guide sequence portion
cuuuauuuuucguaguguccuu

SEQ ID NO: 6487 - RNA, 22 nt, Artificial Sequence
  SAMD9 targeting guide sequence portion
gaaaucaacuuuauuuuucgua

SEQ ID NO: 6488 - RNA, 22 nt, Artificial Sequence
  SAMD9 targeting guide sequence portion
gacacuacgaaaaauaaaguug

SEQ ID NO: 6489 - RNA, 22 nt, Artificial Sequence
  SAMD9 targeting guide sequence portion
gaccagcucuaaggacacuacg

SEQ ID NO: 6490 - RNA, 22 nt, Artificial Sequence
  SAMD9 targeting guide sequence portion
gagaugggaccagcucuaagga

SEQ ID NO: 6491 - RNA, 22 nt, Artificial Sequence
  SAMD9 targeting guide sequence portion
gaugggaccagcucuaaggaca

SEQ ID NO: 6492 - RNA, 22 nt, Artificial Sequence
  SAMD9 targeting guide sequence portion
gcgagaugggaccagcucuaag

SEQ ID NO: 6493 - RNA, 22 nt, Artificial Sequence
  SAMD9 targeting guide sequence portion
gcucuaaggacacuacgaaaaa

SEQ ID NO: 6494 - RNA, 22 nt, Artificial Sequence
  SAMD9 targeting guide sequence portion
gcucugaaaucaacuuuauuuu

SEQ ID NO: 6495 - RNA, 22 nt, Artificial Sequence
  SAMD9 targeting guide sequence portion
ggacacuacgaaaaauaaaguu

SEQ ID NO: 6496 - RNA, 22 nt, Artificial Sequence
  SAMD9 targeting guide sequence portion
ggaccagcucuaaggacacuac

SEQ ID NO: 6497 - RNA, 22 nt, Artificial Sequence
  SAMD9 targeting guide sequence portion
gggaccagcucuaaggacacua

SEQ ID NO: 6498 - RNA, 22 nt, Artificial Sequence
  SAMD9 targeting guide sequence portion
guaguguccuuagagcuggucc

SEQ ID NO: 6499 - RNA, 22 nt, Artificial Sequence
  SAMD9 targeting guide sequence portion
guguccuuagagcuggucccau

SEQ ID NO: 6500 - RNA, 22 nt, Artificial Sequence
  SAMD9 targeting guide sequence portion
uaaggacacuacgaaaaauaaa

SEQ ID NO: 6501 - RNA, 22 nt, Artificial Sequence
  SAMD9 targeting guide sequence portion
uaguguccuuagagcugguccc

SEQ ID NO: 6502 - RNA, 22 nt, Artificial Sequence
  SAMD9 targeting guide sequence portion
uauuuuucguaguguccuuaga

SEQ ID NO: 6503 - RNA, 22 nt, Artificial Sequence
  SAMD9 targeting guide sequence portion
ucaacuuuauuuuucguagugu

SEQ ID NO: 6504 - RNA, 22 nt, Artificial Sequence
  SAMD9 targeting guide sequence portion
ucguaguguccuuagagcuggu

SEQ ID NO: 6505 - RNA, 22 nt, Artificial Sequence
  SAMD9 targeting guide sequence portion
ucuaaggacacuacgaaaaaua

SEQ ID NO: 6506 - RNA, 22 nt, Artificial Sequence
  SAMD9 targeting guide sequence portion
ucugaaaucaacuuuauuuuuc

SEQ ID NO: 6507 - RNA, 22 nt, Artificial Sequence
  SAMD9 targeting guide sequence portion
ugaaaucaacuuuauuuuucgu

SEQ ID NO: 6508 - RNA, 22 nt, Artificial Sequence
  SAMD9 targeting guide sequence portion
ugcgagaugggaccagcucuaa

SEQ ID NO: 6509 - RNA, 22 nt, Artificial Sequence
  SAMD9 targeting guide sequence portion
ugggaccagcucuaaggacacu

SEQ ID NO: 6510 - RNA, 22 nt, Artificial Sequence
  SAMD9 targeting guide sequence portion
uuauuuuucguaguguccuuag

SEQ ID NO: 6511 - RNA, 22 nt, Artificial Sequence
  SAMD9 targeting guide sequence portion
uucguaguguccuuagagcugg

SEQ ID NO: 6512 - RNA, 22 nt, Artificial Sequence
  SAMD9 targeting guide sequence portion
uuuauuuuucguaguguccuua

SEQ ID NO: 6513 - RNA, 22 nt, Artificial Sequence
  SAMD9 targeting guide sequence portion
uuucguaguguccuuagagcug

SEQ ID NO: 6514 - RNA, 22 nt, Artificial Sequence
  SAMD9 targeting guide sequence portion
uuuucguaguguccuuagagcu

SEQ ID NO: 6515 - RNA, 22 nt, Artificial Sequence
  SAMD9 targeting guide sequence portion
uuuuucguaguguccuuagagc

SEQ ID NO: 6516 - RNA, 20 nt, Artificial Sequence
  SAMD9 targeting guide sequence portion
aaaacaugggaacaaaguaa

SEQ ID NO: 6517 - RNA, 20 nt, Artificial Sequence
  SAMD9 targeting guide sequence portion
aaaaugcaaaauuacaacaa

SEQ ID NO: 6518 - RNA, 20 nt, Artificial Sequence
  SAMD9 targeting guide sequence portion
aaaauuacaacaacaaaaca

SEQ ID NO: 6519 - RNA, 20 nt, Artificial Sequence
  SAMD9 targeting guide sequence portion
aaacaugggaacaaaguaaa

SEQ ID NO: 6520 - RNA, 20 nt, Artificial Sequence
  SAMD9 targeting guide sequence portion
aaaugcaaaauuacaacaac

SEQ ID NO: 6521 - RNA, 20 nt, Artificial Sequence
  SAMD9 targeting guide sequence portion
aaauuacaacaacaaaacau

SEQ ID NO: 6522 - RNA, 20 nt, Artificial Sequence
  SAMD9 targeting guide sequence portion
aacaaaacaugggaacaaag

SEQ ID NO: 6523 - RNA, 20 nt, Artificial Sequence
  SAMD9 targeting guide sequence portion
aacaacaaaacaugggaaca

SEQ ID NO: 6524 - RNA, 20 nt, Artificial Sequence
  SAMD9 targeting guide sequence portion
aacaugggaacaaaguaaaa

SEQ ID NO: 6525 - RNA, 20 nt, Artificial Sequence
  SAMD9 targeting guide sequence portion
aaugcaaaauuacaacaaca

SEQ ID NO: 6526 - RNA, 20 nt, Artificial Sequence
  SAMD9 targeting guide sequence portion
aauuacaacaacaaaacaug

SEQ ID NO: 6527 - RNA, 20 nt, Artificial Sequence
  SAMD9 targeting guide sequence portion
aauuuuuuacuuuguuccca

SEQ ID NO: 6528 - RNA, 20 nt, Artificial Sequence
  SAMD9 targeting guide sequence portion
acaaaacaugggaacaaagu

SEQ ID NO: 6529 - RNA, 20 nt, Artificial Sequence
  SAMD9 targeting guide sequence portion
acaacaaaacaugggaacaa

SEQ ID NO: 6530 - RNA, 20 nt, Artificial Sequence
  SAMD9 targeting guide sequence portion
acaacaacaaaacaugggaa

SEQ ID NO: 6531 - RNA, 20 nt, Artificial Sequence
  SAMD9 targeting guide sequence portion
acaugggaacaaaguaaaaa

SEQ ID NO: 6532 - RNA, 20 nt, Artificial Sequence
  SAMD9 targeting guide sequence portion
acuuuguucccauguuuugu

SEQ ID NO: 6533 - RNA, 20 nt, Artificial Sequence
  SAMD9 targeting guide sequence portion
agaauuuuuuacuuuguucc

SEQ ID NO: 6534 - RNA, 20 nt, Artificial Sequence
  SAMD9 targeting guide sequence portion
augcaaaauuacaacaacaa

SEQ ID NO: 6535 - RNA, 20 nt, Artificial Sequence
  SAMD9 targeting guide sequence portion
auguuuuguuguuguaauuu

SEQ ID NO: 6536 - RNA, 20 nt, Artificial Sequence
  SAMD9 targeting guide sequence portion
auuacaacaacaaaacaugg

SEQ ID NO: 6537 - RNA, 20 nt, Artificial Sequence
  SAMD9 targeting guide sequence portion
auuuuuuacuuuguucccau

SEQ ID NO: 6538 - RNA, 20 nt, Artificial Sequence
  SAMD9 targeting guide sequence portion
caaaacaugggaacaaagua

SEQ ID NO: 6539 - RNA, 20 nt, Artificial Sequence
  SAMD9 targeting guide sequence portion
caaaauuacaacaacaaaac

SEQ ID NO: 6540 - RNA, 20 nt, Artificial Sequence
  SAMD9 targeting guide sequence portion
caacaaaacaugggaacaaa

SEQ ID NO: 6541 - RNA, 20 nt, Artificial Sequence
  SAMD9 targeting guide sequence portion
caacaacaaaacaugggaac

SEQ ID NO: 6542 - RNA, 20 nt, Artificial Sequence
  SAMD9 targeting guide sequence portion
caugggaacaaaguaaaaaa

SEQ ID NO: 6543 - RNA, 20 nt, Artificial Sequence
  SAMD9 targeting guide sequence portion
cauguuuuguuguuguaauu

SEQ ID NO: 6544 - RNA, 20 nt, Artificial Sequence
  SAMD9 targeting guide sequence portion
ccauguuuuguuguuguaau

SEQ ID NO: 6545 - RNA, 20 nt, Artificial Sequence
  SAMD9 targeting guide sequence portion
cccauguuuuguuguuguaa

SEQ ID NO: 6546 - RNA, 20 nt, Artificial Sequence
  SAMD9 targeting guide sequence portion
cuuuguucccauguuuuguu

SEQ ID NO: 6547 - RNA, 20 nt, Artificial Sequence
  SAMD9 targeting guide sequence portion
gaauuuuuuacuuuguuccc

SEQ ID NO: 6548 - RNA, 20 nt, Artificial Sequence
  SAMD9 targeting guide sequence portion
gagaauuuuuuacuuuguuc

SEQ ID NO: 6549 - RNA, 20 nt, Artificial Sequence
  SAMD9 targeting guide sequence portion
gcaaaauuacaacaacaaaa

SEQ ID NO: 6550 - RNA, 20 nt, Artificial Sequence
  SAMD9 targeting guide sequence portion
guucccauguuuuguuguug

SEQ ID NO: 6551 - RNA, 20 nt, Artificial Sequence
  SAMD9 targeting guide sequence portion
guuuuguuguuguaauuuug

SEQ ID NO: 6552 - RNA, 20 nt, Artificial Sequence
  SAMD9 targeting guide sequence portion
uacaacaacaaaacauggga

SEQ ID NO: 6553 - RNA, 20 nt, Artificial Sequence
  SAMD9 targeting guide sequence portion
uacuuuguucccauguuuug

SEQ ID NO: 6554 - RNA, 20 nt, Artificial Sequence
  SAMD9 targeting guide sequence portion
ucccauguuuuguuguugua

SEQ ID NO: 6555 - RNA, 20 nt, Artificial Sequence
  SAMD9 targeting guide sequence portion
ugagaauuuuuuacuuuguu

SEQ ID NO: 6556 - RNA, 20 nt, Artificial Sequence
  SAMD9 targeting guide sequence portion
ugcaaaauuacaacaacaaa

SEQ ID NO: 6557 - RNA, 20 nt, Artificial Sequence
  SAMD9 targeting guide sequence portion
uguucccauguuuuguuguu

SEQ ID NO: 6558 - RNA, 20 nt, Artificial Sequence
  SAMD9 targeting guide sequence portion
uguuuuguuguuguaauuuu

SEQ ID NO: 6559 - RNA, 20 nt, Artificial Sequence
  SAMD9 targeting guide sequence portion
uuacaacaacaaaacauggg

SEQ ID NO: 6560 - RNA, 20 nt, Artificial Sequence
  SAMD9 targeting guide sequence portion
uuacuuuguucccauguuuu

SEQ ID NO: 6561 - RNA, 20 nt, Artificial Sequence
  SAMD9 targeting guide sequence portion
uucccauguuuuguuguugu

SEQ ID NO: 6562 - RNA, 20 nt, Artificial Sequence
  SAMD9 targeting guide sequence portion
uuguucccauguuuuguugu

SEQ ID NO: 6563 - RNA, 20 nt, Artificial Sequence
  SAMD9 targeting guide sequence portion
uuuacuuuguucccauguuu

SEQ ID NO: 6564 - RNA, 20 nt, Artificial Sequence
  SAMD9 targeting guide sequence portion
uuuguucccauguuuuguug

SEQ ID NO: 6565 - RNA, 20 nt, Artificial Sequence
  SAMD9 targeting guide sequence portion
uuuuacuuuguucccauguu

SEQ ID NO: 6566 - RNA, 20 nt, Artificial Sequence
  SAMD9 targeting guide sequence portion
uuuuuacuuuguucccaugu

SEQ ID NO: 6567 - RNA, 20 nt, Artificial Sequence
  SAMD9 targeting guide sequence portion
uuuuuuacuuuguucccaug

SEQ ID NO: 6568 - RNA, 21 nt, Artificial Sequence
  SAMD9 targeting guide sequence portion
aaaacaugggaacaaaguaaa

SEQ ID NO: 6569 - RNA, 21 nt, Artificial Sequence
  SAMD9 targeting guide sequence portion
aaaaugcaaaauuacaacaac

SEQ ID NO: 6570 - RNA, 21 nt, Artificial Sequence
  SAMD9 targeting guide sequence portion
aaacaugggaacaaaguaaaa

SEQ ID NO: 6571 - RNA, 21 nt, Artificial Sequence
  SAMD9 targeting guide sequence portion
aaaugcaaaauuacaacaaca

SEQ ID NO: 6572 - RNA, 21 nt, Artificial Sequence
  SAMD9 targeting guide sequence portion
aaauuacaacaacaaaacaug

SEQ ID NO: 6573 - RNA, 21 nt, Artificial Sequence
  SAMD9 targeting guide sequence portion
aacaaaacaugggaacaaagu

SEQ ID NO: 6574 - RNA, 21 nt, Artificial Sequence
  SAMD9 targeting guide sequence portion
aacaacaaaacaugggaacaa

SEQ ID NO: 6575 - RNA, 21 nt, Artificial Sequence
  SAMD9 targeting guide sequence portion
aacaugggaacaaaguaaaaa

SEQ ID NO: 6576 - RNA, 21 nt, Artificial Sequence
  SAMD9 targeting guide sequence portion
aaugcaaaauuacaacaacaa

SEQ ID NO: 6577 - RNA, 21 nt, Artificial Sequence
  SAMD9 targeting guide sequence portion
aauuacaacaacaaaacaugg

SEQ ID NO: 6578 - RNA, 21 nt, Artificial Sequence
  SAMD9 targeting guide sequence portion
aauuuuuuacuuuguucccau

SEQ ID NO: 6579 - RNA, 21 nt, Artificial Sequence
  SAMD9 targeting guide sequence portion
acaaaacaugggaacaaagua

SEQ ID NO: 6580 - RNA, 21 nt, Artificial Sequence
  SAMD9 targeting guide sequence portion
acaacaaaacaugggaacaaa

SEQ ID NO: 6581 - RNA, 21 nt, Artificial Sequence
  SAMD9 targeting guide sequence portion
acaacaacaaaacaugggaac

SEQ ID NO: 6582 - RNA, 21 nt, Artificial Sequence
  SAMD9 targeting guide sequence portion
acaugggaacaaaguaaaaaa

SEQ ID NO: 6583 - RNA, 21 nt, Artificial Sequence
  SAMD9 targeting guide sequence portion
acuuuguucccauguuuuguu

SEQ ID NO: 6584 - RNA, 21 nt, Artificial Sequence
  SAMD9 targeting guide sequence portion
agaauuuuuuacuuuguuccc

SEQ ID NO: 6585 - RNA, 21 nt, Artificial Sequence
  SAMD9 targeting guide sequence portion
augcaaaauuacaacaacaaa

SEQ ID NO: 6586 - RNA, 21 nt, Artificial Sequence
  SAMD9 targeting guide sequence portion
auuacaacaacaaaacauggg

SEQ ID NO: 6587 - RNA, 21 nt, Artificial Sequence
  SAMD9 targeting guide sequence portion
auuuuuuacuuuguucccaug

SEQ ID NO: 6588 - RNA, 21 nt, Artificial Sequence
  SAMD9 targeting guide sequence portion
caaaacaugggaacaaaguaa

SEQ ID NO: 6589 - RNA, 21 nt, Artificial Sequence
  SAMD9 targeting guide sequence portion
caaaauuacaacaacaaaaca

SEQ ID NO: 6590 - RNA, 21 nt, Artificial Sequence
  SAMD9 targeting guide sequence portion
caacaaaacaugggaacaaag

SEQ ID NO: 6591 - RNA, 21 nt, Artificial Sequence
  SAMD9 targeting guide sequence portion
caacaacaaaacaugggaaca

SEQ ID NO: 6592 - RNA, 21 nt, Artificial Sequence
  SAMD9 targeting guide sequence portion
caugggaacaaaguaaaaaau

SEQ ID NO: 6593 - RNA, 21 nt, Artificial Sequence
  SAMD9 targeting guide sequence portion
cauguuuuguuguuguaauuu

SEQ ID NO: 6594 - RNA, 21 nt, Artificial Sequence
  SAMD9 targeting guide sequence portion
ccauguuuuguuguuguaauu

SEQ ID NO: 6595 - RNA, 21 nt, Artificial Sequence
  SAMD9 targeting guide sequence portion
cccauguuuuguuguuguaau

SEQ ID NO: 6596 - RNA, 21 nt, Artificial Sequence
  SAMD9 targeting guide sequence portion
cuuuguucccauguuuuguug

SEQ ID NO: 6597 - RNA, 21 nt, Artificial Sequence
  SAMD9 targeting guide sequence portion
gaauuuuuuacuuuguuccca

SEQ ID NO: 6598 - RNA, 21 nt, Artificial Sequence
  SAMD9 targeting guide sequence portion
gagaauuuuuuacuuuguucc

SEQ ID NO: 6599 - RNA, 21 nt, Artificial Sequence
  SAMD9 targeting guide sequence portion
gcaaaauuacaacaacaaaac

SEQ ID NO: 6600 - RNA, 21 nt, Artificial Sequence
  SAMD9 targeting guide sequence portion
gugagaauuuuuuacuuuguu

SEQ ID NO: 6601 - RNA, 21 nt, Artificial Sequence
  SAMD9 targeting guide sequence portion
guucccauguuuuguuguugu

SEQ ID NO: 6602 - RNA, 21 nt, Artificial Sequence
  SAMD9 targeting guide sequence portion
guuuuguuguuguaauuuugc

SEQ ID NO: 6603 - RNA, 21 nt, Artificial Sequence
  SAMD9 targeting guide sequence portion
uacaacaacaaaacaugggaa

SEQ ID NO: 6604 - RNA, 21 nt, Artificial Sequence
  SAMD9 targeting guide sequence portion
uacuuuguucccauguuuugu

SEQ ID NO: 6605 - RNA, 21 nt, Artificial Sequence
  SAMD9 targeting guide sequence portion
ucccauguuuuguuguuguaa

SEQ ID NO: 6606 - RNA, 21 nt, Artificial Sequence
  SAMD9 targeting guide sequence portion
ugagaauuuuuuacuuuguuc

SEQ ID NO: 6607 - RNA, 21 nt, Artificial Sequence
  SAMD9 targeting guide sequence portion
ugcaaaauuacaacaacaaaa

SEQ ID NO: 6608 - RNA, 21 nt, Artificial Sequence
  SAMD9 targeting guide sequence portion
uguucccauguuuuguuguug

SEQ ID NO: 6609 - RNA, 21 nt, Artificial Sequence
  SAMD9 targeting guide sequence portion
uguuuuguuguuguaauuuug

SEQ ID NO: 6610 - RNA, 21 nt, Artificial Sequence
  SAMD9 targeting guide sequence portion
uuacaacaacaaaacauggga

SEQ ID NO: 6611 - RNA, 21 nt, Artificial Sequence
  SAMD9 targeting guide sequence portion
uuacuuuguucccauguuuug

SEQ ID NO: 6612 - RNA, 21 nt, Artificial Sequence
  SAMD9 targeting guide sequence portion
uucccauguuuuguuguugua

SEQ ID NO: 6613 - RNA, 21 nt, Artificial Sequence
  SAMD9 targeting guide sequence portion
uuguucccauguuuuguuguu

SEQ ID NO: 6614 - RNA, 21 nt, Artificial Sequence
  SAMD9 targeting guide sequence portion
uuuacuuuguucccauguuuu

SEQ ID NO: 6615 - RNA, 21 nt, Artificial Sequence
  SAMD9 targeting guide sequence portion
uuuguucccauguuuuguugu

SEQ ID NO: 6616 - RNA, 21 nt, Artificial Sequence
  SAMD9 targeting guide sequence portion
uuuuacuuuguucccauguuu

SEQ ID NO: 6617 - RNA, 21 nt, Artificial Sequence
  SAMD9 targeting guide sequence portion
uuuuuacuuuguucccauguu

SEQ ID NO: 6618 - RNA, 21 nt, Artificial Sequence
  SAMD9 targeting guide sequence portion
uuuuuuacuuuguucccaugu

SEQ ID NO: 6619 - RNA, 22 nt, Artificial Sequence
  SAMD9 targeting guide sequence portion
aaaacaugggaacaaaguaaaa

SEQ ID NO: 6620 - RNA, 22 nt, Artificial Sequence
  SAMD9 targeting guide sequence portion
aaaaugcaaaauuacaacaaca

SEQ ID NO: 6621 - RNA, 22 nt, Artificial Sequence
  SAMD9 targeting guide sequence portion
aaaauuacaacaacaaaacaug

SEQ ID NO: 6622 - RNA, 22 nt, Artificial Sequence
  SAMD9 targeting guide sequence portion
aaacaugggaacaaaguaaaaa

SEQ ID NO: 6623 - RNA, 22 nt, Artificial Sequence
  SAMD9 targeting guide sequence portion
aaaugcaaaauuacaacaacaa

SEQ ID NO: 6624 - RNA, 22 nt, Artificial Sequence
  SAMD9 targeting guide sequence portion
aaauuacaacaacaaaacaugg

SEQ ID NO: 6625 - RNA, 22 nt, Artificial Sequence
  SAMD9 targeting guide sequence portion
aacaaaacaugggaacaaagua

SEQ ID NO: 6626 - RNA, 22 nt, Artificial Sequence
  SAMD9 targeting guide sequence portion
aacaacaaaacaugggaacaaa

SEQ ID NO: 6627 - RNA, 22 nt, Artificial Sequence
  SAMD9 targeting guide sequence portion
aacaugggaacaaaguaaaaaa

SEQ ID NO: 6628 - RNA, 22 nt, Artificial Sequence
  SAMD9 targeting guide sequence portion
aaugcaaaauuacaacaacaaa

SEQ ID NO: 6629 - RNA, 22 nt, Artificial Sequence
  SAMD9 targeting guide sequence portion
aauuacaacaacaaaacauggg

SEQ ID NO: 6630 - RNA, 22 nt, Artificial Sequence
  SAMD9 targeting guide sequence portion
aauuuuuuacuuuguucccaug

SEQ ID NO: 6631 - RNA, 22 nt, Artificial Sequence
  SAMD9 targeting guide sequence portion
acaaaacaugggaacaaaguaa

SEQ ID NO: 6632 - RNA, 22 nt, Artificial Sequence
  SAMD9 targeting guide sequence portion
acaacaaaacaugggaacaaag

SEQ ID NO: 6633 - RNA, 22 nt, Artificial Sequence
  SAMD9 targeting guide sequence portion
acaacaacaaaacaugggaaca

SEQ ID NO: 6634 - RNA, 22 nt, Artificial Sequence
  SAMD9 targeting guide sequence portion
acaugggaacaaaguaaaaaau

SEQ ID NO: 6635 - RNA, 22 nt, Artificial Sequence
  SAMD9 targeting guide sequence portion
acuuuguucccauguuuuguug

SEQ ID NO: 6636 - RNA, 22 nt, Artificial Sequence
  SAMD9 targeting guide sequence portion
agaauuuuuuacuuuguuccca

SEQ ID NO: 6637 - RNA, 22 nt, Artificial Sequence
  SAMD9 targeting guide sequence portion
agugagaauuuuuuacuuuguu

SEQ ID NO: 6638 - RNA, 22 nt, Artificial Sequence
  SAMD9 targeting guide sequence portion
augcaaaauuacaacaacaaaa

SEQ ID NO: 6639 - RNA, 22 nt, Artificial Sequence
  SAMD9 targeting guide sequence portion
auguuuuguuguuguaauuuug

SEQ ID NO: 6640 - RNA, 22 nt, Artificial Sequence
  SAMD9 targeting guide sequence portion
auuacaacaacaaaacauggga

SEQ ID NO: 6641 - RNA, 22 nt, Artificial Sequence
  SAMD9 targeting guide sequence portion
auuuuuuacuuuguucccaugu

SEQ ID NO: 6642 - RNA, 22 nt, Artificial Sequence
  SAMD9 targeting guide sequence portion
caaaacaugggaacaaaguaaa

SEQ ID NO: 6643 - RNA, 22 nt, Artificial Sequence
  SAMD9 targeting guide sequence portion
caaaauuacaacaacaaaacau

SEQ ID NO: 6644 - RNA, 22 nt, Artificial Sequence
  SAMD9 targeting guide sequence portion
caacaaaacaugggaacaaagu

SEQ ID NO: 6645 - RNA, 22 nt, Artificial Sequence
  SAMD9 targeting guide sequence portion
caacaacaaaacaugggaacaa

SEQ ID NO: 6646 - RNA, 22 nt, Artificial Sequence
  SAMD9 targeting guide sequence portion
caugggaacaaaguaaaaaauu

SEQ ID NO: 6647 - RNA, 22 nt, Artificial Sequence
  SAMD9 targeting guide sequence portion
cauguuuuguuguuguaauuuu

SEQ ID NO: 6648 - RNA, 22 nt, Artificial Sequence
  SAMD9 targeting guide sequence portion
ccauguuuuguuguuguaauuu

SEQ ID NO: 6649 - RNA, 22 nt, Artificial Sequence
  SAMD9 targeting guide sequence portion
cccauguuuuguuguuguaauu

SEQ ID NO: 6650 - RNA, 22 nt, Artificial Sequence
  SAMD9 targeting guide sequence portion
cuuuguucccauguuuuguugu

SEQ ID NO: 6651 - RNA, 22 nt, Artificial Sequence
  SAMD9 targeting guide sequence portion
gaauuuuuuacuuuguucccau

SEQ ID NO: 6652 - RNA, 22 nt, Artificial Sequence
  SAMD9 targeting guide sequence portion
gagaauuuuuuacuuuguuccc

SEQ ID NO: 6653 - RNA, 22 nt, Artificial Sequence
  SAMD9 targeting guide sequence portion
gcaaaauuacaacaacaaaaca

SEQ ID NO: 6654 - RNA, 22 nt, Artificial Sequence
  SAMD9 targeting guide sequence portion
gugagaauuuuuuacuuuguuc

SEQ ID NO: 6655 - RNA, 22 nt, Artificial Sequence
  SAMD9 targeting guide sequence portion
guucccauguuuuguuguugua

SEQ ID NO: 6656 - RNA, 22 nt, Artificial Sequence
  SAMD9 targeting guide sequence portion
guuuuguuguuguaauuuugca

SEQ ID NO: 6657 - RNA, 22 nt, Artificial Sequence
  SAMD9 targeting guide sequence portion
uaaaaugcaaaauuacaacaac

SEQ ID NO: 6658 - RNA, 22 nt, Artificial Sequence
  SAMD9 targeting guide sequence portion
uacaacaacaaaacaugggaac

SEQ ID NO: 6659 - RNA, 22 nt, Artificial Sequence
  SAMD9 targeting guide sequence portion
uacuuuguucccauguuuuguu

SEQ ID NO: 6660 - RNA, 22 nt, Artificial Sequence
  SAMD9 targeting guide sequence portion
ucccauguuuuguuguuguaau

SEQ ID NO: 6661 - RNA, 22 nt, Artificial Sequence
  SAMD9 targeting guide sequence portion
ugagaauuuuuuacuuuguucc

SEQ ID NO: 6662 - RNA, 22 nt, Artificial Sequence
  SAMD9 targeting guide sequence portion
ugcaaaauuacaacaacaaaac

SEQ ID NO: 6663 - RNA, 22 nt, Artificial Sequence
  SAMD9 targeting guide sequence portion
uguucccauguuuuguuguugu

SEQ ID NO: 6664 - RNA, 22 nt, Artificial Sequence
  SAMD9 targeting guide sequence portion
uguuuuguuguuguaauuuugc

SEQ ID NO: 6665 - RNA, 22 nt, Artificial Sequence
  SAMD9 targeting guide sequence portion
uuacaacaacaaaacaugggaa

SEQ ID NO: 6666 - RNA, 22 nt, Artificial Sequence
  SAMD9 targeting guide sequence portion
uuacuuuguucccauguuuugu

SEQ ID NO: 6667 - RNA, 22 nt, Artificial Sequence
  SAMD9 targeting guide sequence portion
uucccauguuuuguuguuguaa

SEQ ID NO: 6668 - RNA, 22 nt, Artificial Sequence
  SAMD9 targeting guide sequence portion
uuguucccauguuuuguuguug

SEQ ID NO: 6669 - RNA, 22 nt, Artificial Sequence
  SAMD9 targeting guide sequence portion
uuuacuuuguucccauguuuug

SEQ ID NO: 6670 - RNA, 22 nt, Artificial Sequence
  SAMD9 targeting guide sequence portion
uuuguucccauguuuuguuguu

SEQ ID NO: 6671 - RNA, 22 nt, Artificial Sequence
  SAMD9 targeting guide sequence portion
uuuuacuuuguucccauguuuu

SEQ ID NO: 6672 - RNA, 22 nt, Artificial Sequence
  SAMD9 targeting guide sequence portion
uuuuuacuuuguucccauguuu

SEQ ID NO: 6673 - RNA, 22 nt, Artificial Sequence
  SAMD9 targeting guide sequence portion
uuuuuuacuuuguucccauguu

SEQ ID NO: 6674 - RNA, 20 nt, Artificial Sequence
  SAMD9 targeting guide sequence portion
aaauguaaaauuacaacaac

SEQ ID NO: 6675 - RNA, 20 nt, Artificial Sequence
  SAMD9 targeting guide sequence portion
aauguaaaauuacaacaaca

SEQ ID NO: 6676 - RNA, 20 nt, Artificial Sequence
  SAMD9 targeting guide sequence portion
aauuuuacauuuuaaucugg

SEQ ID NO: 6677 - RNA, 20 nt, Artificial Sequence
  SAMD9 targeting guide sequence portion
acauuuuaaucuggaaauaa

SEQ ID NO: 6678 - RNA, 20 nt, Artificial Sequence
  SAMD9 targeting guide sequence portion
auaugauuauuuccagauua

SEQ ID NO: 6679 - RNA, 20 nt, Artificial Sequence
  SAMD9 targeting guide sequence portion
augauuauuuccagauuaaa

SEQ ID NO: 6680 - RNA, 20 nt, Artificial Sequence
  SAMD9 targeting guide sequence portion
auguaaaauuacaacaacaa

SEQ ID NO: 6681 - RNA, 20 nt, Artificial Sequence
  SAMD9 targeting guide sequence portion
auuauuuccagauuaaaaug

SEQ ID NO: 6682 - RNA, 20 nt, Artificial Sequence
  SAMD9 targeting guide sequence portion
auuuccagauuaaaauguaa

SEQ ID NO: 6683 - RNA, 20 nt, Artificial Sequence
  SAMD9 targeting guide sequence portion
auuuuacauuuuaaucugga

SEQ ID NO: 6684 - RNA, 20 nt, Artificial Sequence
  SAMD9 targeting guide sequence portion
cauauuuuguuguuguaauu

SEQ ID NO: 6685 - RNA, 20 nt, Artificial Sequence
  SAMD9 targeting guide sequence portion
ccagauuaaaauguaaaauu

SEQ ID NO: 6686 - RNA, 20 nt, Artificial Sequence
  SAMD9 targeting guide sequence portion
ccauauuuuguuguuguaau

SEQ ID NO: 6687 - RNA, 20 nt, Artificial Sequence
  SAMD9 targeting guide sequence portion
cccauauuuuguuguuguaa

SEQ ID NO: 6688 - RNA, 20 nt, Artificial Sequence
  SAMD9 targeting guide sequence portion
gauuauuuccagauuaaaau

SEQ ID NO: 6689 - RNA, 20 nt, Artificial Sequence
  SAMD9 targeting guide sequence portion
guaaaauuacaacaacaaaa

SEQ ID NO: 6690 - RNA, 20 nt, Artificial Sequence
  SAMD9 targeting guide sequence portion
guuguuguaauuuuacauuu

SEQ ID NO: 6691 - RNA, 20 nt, Artificial Sequence
  SAMD9 targeting guide sequence portion
uacauuuuaaucuggaaaua

SEQ ID NO: 6692 - RNA, 20 nt, Artificial Sequence
  SAMD9 targeting guide sequence portion
uaugauuauuuccagauuaa

SEQ ID NO: 6693 - RNA, 20 nt, Artificial Sequence
  SAMD9 targeting guide sequence portion
uauuuccagauuaaaaugua

SEQ ID NO: 6694 - RNA, 20 nt, Artificial Sequence
  SAMD9 targeting guide sequence portion
uccagauuaaaauguaaaau

SEQ ID NO: 6695 - RNA, 20 nt, Artificial Sequence
  SAMD9 targeting guide sequence portion
ucccauauuuuguuguugua

SEQ ID NO: 6696 - RNA, 20 nt, Artificial Sequence
  SAMD9 targeting guide sequence portion
ugauuauuuccagauuaaaa

SEQ ID NO: 6697 - RNA, 20 nt, Artificial Sequence
  SAMD9 targeting guide sequence portion
uguaaaauuacaacaacaaa

SEQ ID NO: 6698 - RNA, 20 nt, Artificial Sequence
  SAMD9 targeting guide sequence portion
uguuguuguaauuuuacauu

SEQ ID NO: 6699 - RNA, 20 nt, Artificial Sequence
  SAMD9 targeting guide sequence portion
uuacauuuuaaucuggaaau

SEQ ID NO: 6700 - RNA, 20 nt, Artificial Sequence
  SAMD9 targeting guide sequence portion
uuauuuccagauuaaaaugu

SEQ ID NO: 6701 - RNA, 20 nt, Artificial Sequence
  SAMD9 targeting guide sequence portion
uuccagauuaaaauguaaaa

SEQ ID NO: 6702 - RNA, 20 nt, Artificial Sequence
  SAMD9 targeting guide sequence portion
uuguuguuguaauuuuacau

SEQ ID NO: 6703 - RNA, 20 nt, Artificial Sequence
  SAMD9 targeting guide sequence portion
uuuacauuuuaaucuggaaa

SEQ ID NO: 6704 - RNA, 20 nt, Artificial Sequence
  SAMD9 targeting guide sequence portion
uuuccagauuaaaauguaaa

SEQ ID NO: 6705 - RNA, 20 nt, Artificial Sequence
  SAMD9 targeting guide sequence portion
uuuguuguuguaauuuuaca

SEQ ID NO: 6706 - RNA, 20 nt, Artificial Sequence
  SAMD9 targeting guide sequence portion
uuuuacauuuuaaucuggaa

SEQ ID NO: 6707 - RNA, 20 nt, Artificial Sequence
  SAMD9 targeting guide sequence portion
uuuuguuguuguaauuuuac

SEQ ID NO: 6708 - RNA, 21 nt, Artificial Sequence
  SAMD9 targeting guide sequence portion
ccauauuuuguuguuguaauu

SEQ ID NO: 6709 - RNA, 21 nt, Artificial Sequence
  SAMD9 targeting guide sequence portion
cccauauuuuguuguuguaau

SEQ ID NO: 6710 - RNA, 21 nt, Artificial Sequence
  SAMD9 targeting guide sequence portion
gauuauuuccagauuaaaaug

SEQ ID NO: 6711 - RNA, 21 nt, Artificial Sequence
  SAMD9 targeting guide sequence portion
ucccauauuuuguuguuguaa

SEQ ID NO: 6712 - RNA, 21 nt, Artificial Sequence
  SAMD9 targeting guide sequence portion
uucccauauuuuguuguugua

SEQ ID NO: 6713 - RNA, 22 nt, Artificial Sequence
  SAMD9 targeting guide sequence portion
acauuuuaaucuggaaauaauc

SEQ ID NO: 6714 - RNA, 22 nt, Artificial Sequence
  SAMD9 targeting guide sequence portion
caauaugauuauuuccagauua

SEQ ID NO: 6715 - RNA, 22 nt, Artificial Sequence
  SAMD9 targeting guide sequence portion
ccagauuaaaauguaaaauuac

SEQ ID NO: 6716 - RNA, 22 nt, Artificial Sequence
  SAMD9 targeting guide sequence portion
ccauauuuuguuguuguaauuu

SEQ ID NO: 6717 - RNA, 22 nt, Artificial Sequence
  SAMD9 targeting guide sequence portion
cccauauuuuguuguuguaauu

SEQ ID NO: 6718 - RNA, 22 nt, Artificial Sequence
  SAMD9 targeting guide sequence portion
gauuauuuccagauuaaaaugu

SEQ ID NO: 6719 - RNA, 22 nt, Artificial Sequence
  SAMD9 targeting guide sequence portion
guaauuuuacauuuuaaucugg

SEQ ID NO: 6720 - RNA, 22 nt, Artificial Sequence
  SAMD9 targeting guide sequence portion
guucccauauuuuguuguugua

SEQ ID NO: 6721 - RNA, 22 nt, Artificial Sequence
  SAMD9 targeting guide sequence portion
ucccauauuuuguuguuguaau

SEQ ID NO: 6722 - RNA, 22 nt, Artificial Sequence
  SAMD9 targeting guide sequence portion
ugauuauuuccagauuaaaaug

SEQ ID NO: 6723 - RNA, 22 nt, Artificial Sequence
  SAMD9 targeting guide sequence portion
uucccauauuuuguuguuguaa

SEQ ID NO: 6724 - RNA, 20 nt, Artificial Sequence
  SAMD9 targeting guide sequence portion
aaaauacuuguuugucauca

SEQ ID NO: 6725 - RNA, 20 nt, Artificial Sequence
  SAMD9 targeting guide sequence portion
aaauacuuguuugucaucag

SEQ ID NO: 6726 - RNA, 20 nt, Artificial Sequence
  SAMD9 targeting guide sequence portion
aaccauuucaaucugaugac

SEQ ID NO: 6727 - RNA, 20 nt, Artificial Sequence
  SAMD9 targeting guide sequence portion
aauacuuguuugucaucaga

SEQ ID NO: 6728 - RNA, 20 nt, Artificial Sequence
  SAMD9 targeting guide sequence portion
aaucugaugacaaacaagua

SEQ ID NO: 6729 - RNA, 20 nt, Artificial Sequence
  SAMD9 targeting guide sequence portion
acaaacaaguauuuugaaga

SEQ ID NO: 6730 - RNA, 20 nt, Artificial Sequence
  SAMD9 targeting guide sequence portion
accauuucaaucugaugaca

SEQ ID NO: 6731 - RNA, 20 nt, Artificial Sequence
  SAMD9 targeting guide sequence portion
acuuguuugucaucagauug

SEQ ID NO: 6732 - RNA, 20 nt, Artificial Sequence
  SAMD9 targeting guide sequence portion
auacuuguuugucaucagau

SEQ ID NO: 6733 - RNA, 20 nt, Artificial Sequence
  SAMD9 targeting guide sequence portion
aucugaugacaaacaaguau

SEQ ID NO: 6734 - RNA, 20 nt, Artificial Sequence
  SAMD9 targeting guide sequence portion
augacaaacaaguauuuuga

SEQ ID NO: 6735 - RNA, 20 nt, Artificial Sequence
  SAMD9 targeting guide sequence portion
auggucuucaaaauacuugu

SEQ ID NO: 6736 - RNA, 20 nt, Artificial Sequence
  SAMD9 targeting guide sequence portion
auuaaccauuucaaucugau

SEQ ID NO: 6737 - RNA, 20 nt, Artificial Sequence
  SAMD9 targeting guide sequence portion
auuucaaucugaugacaaac

SEQ ID NO: 6738 - RNA, 20 nt, Artificial Sequence
  SAMD9 targeting guide sequence portion
caaaauacuuguuugucauc

SEQ ID NO: 6739 - RNA, 20 nt, Artificial Sequence
  SAMD9 targeting guide sequence portion
caaacaaguauuuugaagac

SEQ ID NO: 6740 - RNA, 20 nt, Artificial Sequence
  SAMD9 targeting guide sequence portion
caaucugaugacaaacaagu

SEQ ID NO: 6741 - RNA, 20 nt, Artificial Sequence
  SAMD9 targeting guide sequence portion
cauuaaccauuucaaucuga

SEQ ID NO: 6742 - RNA, 20 nt, Artificial Sequence
  SAMD9 targeting guide sequence portion
cauuucaaucugaugacaaa

SEQ ID NO: 6743 - RNA, 20 nt, Artificial Sequence
  SAMD9 targeting guide sequence portion
ccauuucaaucugaugacaa

SEQ ID NO: 6744 - RNA, 20 nt, Artificial Sequence
  SAMD9 targeting guide sequence portion
cucauuaaccauuucaaucu

SEQ ID NO: 6745 - RNA, 20 nt, Artificial Sequence
  SAMD9 targeting guide sequence portion
cugaugacaaacaaguauuu

SEQ ID NO: 6746 - RNA, 20 nt, Artificial Sequence
  SAMD9 targeting guide sequence portion
cuucaaaauacuuguuuguc

SEQ ID NO: 6747 - RNA, 20 nt, Artificial Sequence
  SAMD9 targeting guide sequence portion
cuuguuugucaucagauuga

SEQ ID NO: 6748 - RNA, 20 nt, Artificial Sequence
  SAMD9 targeting guide sequence portion
gacaaacaaguauuuugaag

SEQ ID NO: 6749 - RNA, 20 nt, Artificial Sequence
  SAMD9 targeting guide sequence portion
gaugacaaacaaguauuuug

SEQ ID NO: 6750 - RNA, 20 nt, Artificial Sequence
  SAMD9 targeting guide sequence portion
gauggucuucaaaauacuug

SEQ ID NO: 6751 - RNA, 20 nt, Artificial Sequence
  SAMD9 targeting guide sequence portion
ggucuucaaaauacuuguuu

SEQ ID NO: 6752 - RNA, 20 nt, Artificial Sequence
  SAMD9 targeting guide sequence portion
gucaucagauugaaaugguu

SEQ ID NO: 6753 - RNA, 20 nt, Artificial Sequence
  SAMD9 targeting guide sequence portion
gucuucaaaauacuuguuug

SEQ ID NO: 6754 - RNA, 20 nt, Artificial Sequence
  SAMD9 targeting guide sequence portion
guuugucaucagauugaaau

SEQ ID NO: 6755 - RNA, 20 nt, Artificial Sequence
  SAMD9 targeting guide sequence portion
uaaccauuucaaucugauga

SEQ ID NO: 6756 - RNA, 20 nt, Artificial Sequence
  SAMD9 targeting guide sequence portion
uacuuguuugucaucagauu

SEQ ID NO: 6757 - RNA, 20 nt, Artificial Sequence
  SAMD9 targeting guide sequence portion
ucaaaauacuuguuugucau

SEQ ID NO: 6758 - RNA, 20 nt, Artificial Sequence
  SAMD9 targeting guide sequence portion
ucaaucugaugacaaacaag

SEQ ID NO: 6759 - RNA, 20 nt, Artificial Sequence
  SAMD9 targeting guide sequence portion
ucauuaaccauuucaaucug

SEQ ID NO: 6760 - RNA, 20 nt, Artificial Sequence
  SAMD9 targeting guide sequence portion
ucugaugacaaacaaguauu

SEQ ID NO: 6761 - RNA, 20 nt, Artificial Sequence
  SAMD9 targeting guide sequence portion
ucuucaaaauacuuguuugu

SEQ ID NO: 6762 - RNA, 20 nt, Artificial Sequence
  SAMD9 targeting guide sequence portion
ugacaaacaaguauuuugaa

SEQ ID NO: 6763 - RNA, 20 nt, Artificial Sequence
  SAMD9 targeting guide sequence portion
ugaugacaaacaaguauuuu

SEQ ID NO: 6764 - RNA, 20 nt, Artificial Sequence
  SAMD9 targeting guide sequence portion
ugauggucuucaaaauacuu

SEQ ID NO: 6765 - RNA, 20 nt, Artificial Sequence
  SAMD9 targeting guide sequence portion
uggucuucaaaauacuuguu

SEQ ID NO: 6766 - RNA, 20 nt, Artificial Sequence
  SAMD9 targeting guide sequence portion
ugucaucagauugaaauggu

SEQ ID NO: 6767 - RNA, 20 nt, Artificial Sequence
  SAMD9 targeting guide sequence portion
uguuugucaucagauugaaa

SEQ ID NO: 6768 - RNA, 20 nt, Artificial Sequence
  SAMD9 targeting guide sequence portion
uuaaccauuucaaucugaug

SEQ ID NO: 6769 - RNA, 20 nt, Artificial Sequence
  SAMD9 targeting guide sequence portion
uucaaaauacuuguuuguca

SEQ ID NO: 6770 - RNA, 20 nt, Artificial Sequence
  SAMD9 targeting guide sequence portion
uucaaucugaugacaaacaa

SEQ ID NO: 6771 - RNA, 20 nt, Artificial Sequence
  SAMD9 targeting guide sequence portion
uugauggucuucaaaauacu

SEQ ID NO: 6772 - RNA, 20 nt, Artificial Sequence
  SAMD9 targeting guide sequence portion
uugucaucagauugaaaugg

SEQ ID NO: 6773 - RNA, 20 nt, Artificial Sequence
  SAMD9 targeting guide sequence portion
uuguuugucaucagauugaa

SEQ ID NO: 6774 - RNA, 20 nt, Artificial Sequence
  SAMD9 targeting guide sequence portion
uuucaaucugaugacaaaca

SEQ ID NO: 6775 - RNA, 20 nt, Artificial Sequence
  SAMD9 targeting guide sequence portion
uuugucaucagauugaaaug

SEQ ID NO: 6776 - RNA, 21 nt, Artificial Sequence
  SAMD9 targeting guide sequence portion
aaaauacuuguuugucaucag

SEQ ID NO: 6777 - RNA, 21 nt, Artificial Sequence
  SAMD9 targeting guide sequence portion
aaauacuuguuugucaucaga

SEQ ID NO: 6778 - RNA, 21 nt, Artificial Sequence
  SAMD9 targeting guide sequence portion
aaccauuucaaucugaugaca

SEQ ID NO: 6779 - RNA, 21 nt, Artificial Sequence
  SAMD9 targeting guide sequence portion
aauacuuguuugucaucagau

SEQ ID NO: 6780 - RNA, 21 nt, Artificial Sequence
  SAMD9 targeting guide sequence portion
aaucugaugacaaacaaguau

SEQ ID NO: 6781 - RNA, 21 nt, Artificial Sequence
  SAMD9 targeting guide sequence portion
acaaacaaguauuuugaagac

SEQ ID NO: 6782 - RNA, 21 nt, Artificial Sequence
  SAMD9 targeting guide sequence portion
accauuucaaucugaugacaa

SEQ ID NO: 6783 - RNA, 21 nt, Artificial Sequence
  SAMD9 targeting guide sequence portion
acuuguuugucaucagauuga

SEQ ID NO: 6784 - RNA, 21 nt, Artificial Sequence
  SAMD9 targeting guide sequence portion
auacuuguuugucaucagauu

SEQ ID NO: 6785 - RNA, 21 nt, Artificial Sequence
  SAMD9 targeting guide sequence portion
aucugaugacaaacaaguauu

SEQ ID NO: 6786 - RNA, 21 nt, Artificial Sequence
  SAMD9 targeting guide sequence portion
augacaaacaaguauuuugaa

SEQ ID NO: 6787 - RNA, 21 nt, Artificial Sequence
  SAMD9 targeting guide sequence portion
auggucuucaaaauacuuguu

SEQ ID NO: 6788 - RNA, 21 nt, Artificial Sequence
  SAMD9 targeting guide sequence portion
auuaaccauuucaaucugaug

SEQ ID NO: 6789 - RNA, 21 nt, Artificial Sequence
  SAMD9 targeting guide sequence portion
auuucaaucugaugacaaaca

SEQ ID NO: 6790 - RNA, 21 nt, Artificial Sequence
  SAMD9 targeting guide sequence portion
caaaauacuuguuugucauca

SEQ ID NO: 6791 - RNA, 21 nt, Artificial Sequence
  SAMD9 targeting guide sequence portion
caaacaaguauuuugaagacc

SEQ ID NO: 6792 - RNA, 21 nt, Artificial Sequence
  SAMD9 targeting guide sequence portion
caaucugaugacaaacaagua

SEQ ID NO: 6793 - RNA, 21 nt, Artificial Sequence
  SAMD9 targeting guide sequence portion
cauuaaccauuucaaucugau

SEQ ID NO: 6794 - RNA, 21 nt, Artificial Sequence
  SAMD9 targeting guide sequence portion
cauuucaaucugaugacaaac

SEQ ID NO: 6795 - RNA, 21 nt, Artificial Sequence
  SAMD9 targeting guide sequence portion
ccauuucaaucugaugacaaa

SEQ ID NO: 6796 - RNA, 21 nt, Artificial Sequence
  SAMD9 targeting guide sequence portion
ccucauuaaccauuucaaucu

SEQ ID NO: 6797 - RNA, 21 nt, Artificial Sequence
  SAMD9 targeting guide sequence portion
cucauuaaccauuucaaucug

SEQ ID NO: 6798 - RNA, 21 nt, Artificial Sequence
  SAMD9 targeting guide sequence portion
cugaugacaaacaaguauuuu

SEQ ID NO: 6799 - RNA, 21 nt, Artificial Sequence
  SAMD9 targeting guide sequence portion
cuucaaaauacuuguuuguca

SEQ ID NO: 6800 - RNA, 21 nt, Artificial Sequence
  SAMD9 targeting guide sequence portion
cuugauggucuucaaaauacu

SEQ ID NO: 6801 - RNA, 21 nt, Artificial Sequence
  SAMD9 targeting guide sequence portion
cuuguuugucaucagauugaa

SEQ ID NO: 6802 - RNA, 21 nt, Artificial Sequence
  SAMD9 targeting guide sequence portion
gacaaacaaguauuuugaaga

SEQ ID NO: 6803 - RNA, 21 nt, Artificial Sequence
  SAMD9 targeting guide sequence portion
gaugacaaacaaguauuuuga

SEQ ID NO: 6804 - RNA, 21 nt, Artificial Sequence
  SAMD9 targeting guide sequence portion
gauggucuucaaaauacuugu

SEQ ID NO: 6805 - RNA, 21 nt, Artificial Sequence
  SAMD9 targeting guide sequence portion
ggucuucaaaauacuuguuug

SEQ ID NO: 6806 - RNA, 21 nt, Artificial Sequence
  SAMD9 targeting guide sequence portion
gucaucagauugaaaugguua

SEQ ID NO: 6807 - RNA, 21 nt, Artificial Sequence
  SAMD9 targeting guide sequence portion
gucuucaaaauacuuguuugu

SEQ ID NO: 6808 - RNA, 21 nt, Artificial Sequence
  SAMD9 targeting guide sequence portion
guuugucaucagauugaaaug

SEQ ID NO: 6809 - RNA, 21 nt, Artificial Sequence
  SAMD9 targeting guide sequence portion
uaaccauuucaaucugaugac

SEQ ID NO: 6810 - RNA, 21 nt, Artificial Sequence
  SAMD9 targeting guide sequence portion
uacuuguuugucaucagauug

SEQ ID NO: 6811 - RNA, 21 nt, Artificial Sequence
  SAMD9 targeting guide sequence portion
ucaaaauacuuguuugucauc

SEQ ID NO: 6812 - RNA, 21 nt, Artificial Sequence
  SAMD9 targeting guide sequence portion
ucaaucugaugacaaacaagu

SEQ ID NO: 6813 - RNA, 21 nt, Artificial Sequence
  SAMD9 targeting guide sequence portion
ucauuaaccauuucaaucuga

SEQ ID NO: 6814 - RNA, 21 nt, Artificial Sequence
  SAMD9 targeting guide sequence portion
ucugaugacaaacaaguauuu

SEQ ID NO: 6815 - RNA, 21 nt, Artificial Sequence
  SAMD9 targeting guide sequence portion
ucuucaaaauacuuguuuguc

SEQ ID NO: 6816 - RNA, 21 nt, Artificial Sequence
  SAMD9 targeting guide sequence portion
ugacaaacaaguauuuugaag

SEQ ID NO: 6817 - RNA, 21 nt, Artificial Sequence
  SAMD9 targeting guide sequence portion
ugaugacaaacaaguauuuug

SEQ ID NO: 6818 - RNA, 21 nt, Artificial Sequence
  SAMD9 targeting guide sequence portion
ugauggucuucaaaauacuug

SEQ ID NO: 6819 - RNA, 21 nt, Artificial Sequence
  SAMD9 targeting guide sequence portion
uggucuucaaaauacuuguuu

SEQ ID NO: 6820 - RNA, 21 nt, Artificial Sequence
  SAMD9 targeting guide sequence portion
ugucaucagauugaaaugguu

SEQ ID NO: 6821 - RNA, 21 nt, Artificial Sequence
  SAMD9 targeting guide sequence portion
uguuugucaucagauugaaau

SEQ ID NO: 6822 - RNA, 21 nt, Artificial Sequence
  SAMD9 targeting guide sequence portion
uuaaccauuucaaucugauga

SEQ ID NO: 6823 - RNA, 21 nt, Artificial Sequence
  SAMD9 targeting guide sequence portion
uucaaaauacuuguuugucau

SEQ ID NO: 6824 - RNA, 21 nt, Artificial Sequence
  SAMD9 targeting guide sequence portion
uucaaucugaugacaaacaag

SEQ ID NO: 6825 - RNA, 21 nt, Artificial Sequence
  SAMD9 targeting guide sequence portion
uugauggucuucaaaauacuu

SEQ ID NO: 6826 - RNA, 21 nt, Artificial Sequence
  SAMD9 targeting guide sequence portion
uugucaucagauugaaauggu

SEQ ID NO: 6827 - RNA, 21 nt, Artificial Sequence
  SAMD9 targeting guide sequence portion
uuguuugucaucagauugaaa

SEQ ID NO: 6828 - RNA, 21 nt, Artificial Sequence
  SAMD9 targeting guide sequence portion
uuucaaucugaugacaaacaa

SEQ ID NO: 6829 - RNA, 21 nt, Artificial Sequence
  SAMD9 targeting guide sequence portion
uuugucaucagauugaaaugg

SEQ ID NO: 6830 - RNA, 22 nt, Artificial Sequence
  SAMD9 targeting guide sequence portion
aaaauacuuguuugucaucaga

SEQ ID NO: 6831 - RNA, 22 nt, Artificial Sequence
  SAMD9 targeting guide sequence portion
aaauacuuguuugucaucagau

SEQ ID NO: 6832 - RNA, 22 nt, Artificial Sequence
  SAMD9 targeting guide sequence portion
aaccauuucaaucugaugacaa

SEQ ID NO: 6833 - RNA, 22 nt, Artificial Sequence
  SAMD9 targeting guide sequence portion
aauacuuguuugucaucagauu

SEQ ID NO: 6834 - RNA, 22 nt, Artificial Sequence
  SAMD9 targeting guide sequence portion
aaucugaugacaaacaaguauu

SEQ ID NO: 6835 - RNA, 22 nt, Artificial Sequence
  SAMD9 targeting guide sequence portion
acaaacaaguauuuugaagacc

SEQ ID NO: 6836 - RNA, 22 nt, Artificial Sequence
  SAMD9 targeting guide sequence portion
accauuucaaucugaugacaaa

SEQ ID NO: 6837 - RNA, 22 nt, Artificial Sequence
  SAMD9 targeting guide sequence portion
acuugauggucuucaaaauacu

SEQ ID NO: 6838 - RNA, 22 nt, Artificial Sequence
  SAMD9 targeting guide sequence portion
acuuguuugucaucagauugaa

SEQ ID NO: 6839 - RNA, 22 nt, Artificial Sequence
  SAMD9 targeting guide sequence portion
auacuuguuugucaucagauug

SEQ ID NO: 6840 - RNA, 22 nt, Artificial Sequence
  SAMD9 targeting guide sequence portion
aucugaugacaaacaaguauuu

SEQ ID NO: 6841 - RNA, 22 nt, Artificial Sequence
  SAMD9 targeting guide sequence portion
augacaaacaaguauuuugaag

SEQ ID NO: 6842 - RNA, 22 nt, Artificial Sequence
  SAMD9 targeting guide sequence portion
auggucuucaaaauacuuguuu

SEQ ID NO: 6843 - RNA, 22 nt, Artificial Sequence
  SAMD9 targeting guide sequence portion
auuaaccauuucaaucugauga

SEQ ID NO: 6844 - RNA, 22 nt, Artificial Sequence
  SAMD9 targeting guide sequence portion
auuucaaucugaugacaaacaa

SEQ ID NO: 6845 - RNA, 22 nt, Artificial Sequence
  SAMD9 targeting guide sequence portion
caaaauacuuguuugucaucag

SEQ ID NO: 6846 - RNA, 22 nt, Artificial Sequence
  SAMD9 targeting guide sequence portion
caaacaaguauuuugaagacca

SEQ ID NO: 6847 - RNA, 22 nt, Artificial Sequence
  SAMD9 targeting guide sequence portion
caaucugaugacaaacaaguau

SEQ ID NO: 6848 - RNA, 22 nt, Artificial Sequence
  SAMD9 targeting guide sequence portion
cauuaaccauuucaaucugaug

SEQ ID NO: 6849 - RNA, 22 nt, Artificial Sequence
  SAMD9 targeting guide sequence portion
cauuucaaucugaugacaaaca

SEQ ID NO: 6850 - RNA, 22 nt, Artificial Sequence
  SAMD9 targeting guide sequence portion
ccauuucaaucugaugacaaac

SEQ ID NO: 6851 - RNA, 22 nt, Artificial Sequence
  SAMD9 targeting guide sequence portion
cccucauuaaccauuucaaucu

SEQ ID NO: 6852 - RNA, 22 nt, Artificial Sequence
  SAMD9 targeting guide sequence portion
ccucauuaaccauuucaaucug

SEQ ID NO: 6853 - RNA, 22 nt, Artificial Sequence
  SAMD9 targeting guide sequence portion
cucauuaaccauuucaaucuga

SEQ ID NO: 6854 - RNA, 22 nt, Artificial Sequence
  SAMD9 targeting guide sequence portion
cugaugacaaacaaguauuuug

SEQ ID NO: 6855 - RNA, 22 nt, Artificial Sequence
  SAMD9 targeting guide sequence portion
cuucaaaauacuuguuugucau

SEQ ID NO: 6856 - RNA, 22 nt, Artificial Sequence
  SAMD9 targeting guide sequence portion
cuugauggucuucaaaauacuu

SEQ ID NO: 6857 - RNA, 22 nt, Artificial Sequence
  SAMD9 targeting guide sequence portion
cuuguuugucaucagauugaaa

SEQ ID NO: 6858 - RNA, 22 nt, Artificial Sequence
  SAMD9 targeting guide sequence portion
gacaaacaaguauuuugaagac

SEQ ID NO: 6859 - RNA, 22 nt, Artificial Sequence
  SAMD9 targeting guide sequence portion
gaugacaaacaaguauuuugaa

SEQ ID NO: 6860 - RNA, 22 nt, Artificial Sequence
  SAMD9 targeting guide sequence portion
gauggucuucaaaauacuuguu

SEQ ID NO: 6861 - RNA, 22 nt, Artificial Sequence
  SAMD9 targeting guide sequence portion
ggucuucaaaauacuuguuugu

SEQ ID NO: 6862 - RNA, 22 nt, Artificial Sequence
  SAMD9 targeting guide sequence portion
gucaucagauugaaaugguuaa

SEQ ID NO: 6863 - RNA, 22 nt, Artificial Sequence
  SAMD9 targeting guide sequence portion
gucuucaaaauacuuguuuguc

SEQ ID NO: 6864 - RNA, 22 nt, Artificial Sequence
  SAMD9 targeting guide sequence portion
guuugucaucagauugaaaugg

SEQ ID NO: 6865 - RNA, 22 nt, Artificial Sequence
  SAMD9 targeting guide sequence portion
uaaccauuucaaucugaugaca

SEQ ID NO: 6866 - RNA, 22 nt, Artificial Sequence
  SAMD9 targeting guide sequence portion
uacuuguuugucaucagauuga

SEQ ID NO: 6867 - RNA, 22 nt, Artificial Sequence
  SAMD9 targeting guide sequence portion
ucaaaauacuuguuugucauca

SEQ ID NO: 6868 - RNA, 22 nt, Artificial Sequence
  SAMD9 targeting guide sequence portion
ucaaucugaugacaaacaagua

SEQ ID NO: 6869 - RNA, 22 nt, Artificial Sequence
  SAMD9 targeting guide sequence portion
ucauuaaccauuucaaucugau

SEQ ID NO: 6870 - RNA, 22 nt, Artificial Sequence
  SAMD9 targeting guide sequence portion
ucugaugacaaacaaguauuuu

SEQ ID NO: 6871 - RNA, 22 nt, Artificial Sequence
  SAMD9 targeting guide sequence portion
ucuucaaaauacuuguuuguca

SEQ ID NO: 6872 - RNA, 22 nt, Artificial Sequence
  SAMD9 targeting guide sequence portion
ugacaaacaaguauuuugaaga

SEQ ID NO: 6873 - RNA, 22 nt, Artificial Sequence
  SAMD9 targeting guide sequence portion
ugaugacaaacaaguauuuuga

SEQ ID NO: 6874 - RNA, 22 nt, Artificial Sequence
  SAMD9 targeting guide sequence portion
ugauggucuucaaaauacuugu

SEQ ID NO: 6875 - RNA, 22 nt, Artificial Sequence
  SAMD9 targeting guide sequence portion
uggucuucaaaauacuuguuug

SEQ ID NO: 6876 - RNA, 22 nt, Artificial Sequence
  SAMD9 targeting guide sequence portion
ugucaucagauugaaaugguua

SEQ ID NO: 6877 - RNA, 22 nt, Artificial Sequence
  SAMD9 targeting guide sequence portion
uguuugucaucagauugaaaug

SEQ ID NO: 6878 - RNA, 22 nt, Artificial Sequence
  SAMD9 targeting guide sequence portion
uuaaccauuucaaucugaugac

SEQ ID NO: 6879 - RNA, 22 nt, Artificial Sequence
  SAMD9 targeting guide sequence portion
uucaaaauacuuguuugucauc

SEQ ID NO: 6880 - RNA, 22 nt, Artificial Sequence
  SAMD9 targeting guide sequence portion
uucaaucugaugacaaacaagu

SEQ ID NO: 6881 - RNA, 22 nt, Artificial Sequence
  SAMD9 targeting guide sequence portion
uugauggucuucaaaauacuug

SEQ ID NO: 6882 - RNA, 22 nt, Artificial Sequence
  SAMD9 targeting guide sequence portion
uugucaucagauugaaaugguu

SEQ ID NO: 6883 - RNA, 22 nt, Artificial Sequence
  SAMD9 targeting guide sequence portion
uuguuugucaucagauugaaau

SEQ ID NO: 6884 - RNA, 22 nt, Artificial Sequence
  SAMD9 targeting guide sequence portion
uuucaaucugaugacaaacaag

SEQ ID NO: 6885 - RNA, 22 nt, Artificial Sequence
  SAMD9 targeting guide sequence portion
uuugucaucagauugaaauggu

SEQ ID NO: 6886 - RNA, 20 nt, Artificial Sequence
  SAMD9 targeting guide sequence portion
aaauuggaaaaccucauugc

SEQ ID NO: 6887 - RNA, 20 nt, Artificial Sequence
  SAMD9 targeting guide sequence portion
aaauuuagcaaugagguuuu

SEQ ID NO: 6888 - RNA, 20 nt, Artificial Sequence
  SAMD9 targeting guide sequence portion
aagcaaauuggaaaaccuca

SEQ ID NO: 6889 - RNA, 20 nt, Artificial Sequence
  SAMD9 targeting guide sequence portion
aagcugaagcaaauuggaaa

SEQ ID NO: 6890 - RNA, 20 nt, Artificial Sequence
  SAMD9 targeting guide sequence portion
aaugagguuuuccaauuugc

SEQ ID NO: 6891 - RNA, 20 nt, Artificial Sequence
  SAMD9 targeting guide sequence portion
aauucauacaagcugaagca

SEQ ID NO: 6892 - RNA, 20 nt, Artificial Sequence
  SAMD9 targeting guide sequence portion
aauuggaaaaccucauugcu

SEQ ID NO: 6893 - RNA, 20 nt, Artificial Sequence
  SAMD9 targeting guide sequence portion
aauuuagcaaugagguuuuc

SEQ ID NO: 6894 - RNA, 20 nt, Artificial Sequence
  SAMD9 targeting guide sequence portion
aauuugcuucagcuuguaug

SEQ ID NO: 6895 - RNA, 20 nt, Artificial Sequence
  SAMD9 targeting guide sequence portion
acaagcugaagcaaauugga

SEQ ID NO: 6896 - RNA, 20 nt, Artificial Sequence
  SAMD9 targeting guide sequence portion
agcaaauuggaaaaccucau

SEQ ID NO: 6897 - RNA, 20 nt, Artificial Sequence
  SAMD9 targeting guide sequence portion
agcaaugagguuuuccaauu

SEQ ID NO: 6898 - RNA, 20 nt, Artificial Sequence
  SAMD9 targeting guide sequence portion
agcugaagcaaauuggaaaa

SEQ ID NO: 6899 - RNA, 20 nt, Artificial Sequence
  SAMD9 targeting guide sequence portion
agguuuuccaauuugcuuca

SEQ ID NO: 6900 - RNA, 20 nt, Artificial Sequence
  SAMD9 targeting guide sequence portion
auacaagcugaagcaaauug

SEQ ID NO: 6901 - RNA, 20 nt, Artificial Sequence
  SAMD9 targeting guide sequence portion
augaaauuuagcaaugaggu

SEQ ID NO: 6902 - RNA, 20 nt, Artificial Sequence
  SAMD9 targeting guide sequence portion
augagguuuuccaauuugcu

SEQ ID NO: 6903 - RNA, 20 nt, Artificial Sequence
  SAMD9 targeting guide sequence portion
auucauacaagcugaagcaa

SEQ ID NO: 6904 - RNA, 20 nt, Artificial Sequence
  SAMD9 targeting guide sequence portion
auuggaaaaccucauugcua

SEQ ID NO: 6905 - RNA, 20 nt, Artificial Sequence
  SAMD9 targeting guide sequence portion
auuuagcaaugagguuuucc

SEQ ID NO: 6906 - RNA, 20 nt, Artificial Sequence
  SAMD9 targeting guide sequence portion
caaauuggaaaaccucauug

SEQ ID NO: 6907 - RNA, 20 nt, Artificial Sequence
  SAMD9 targeting guide sequence portion
caagcugaagcaaauuggaa

SEQ ID NO: 6908 - RNA, 20 nt, Artificial Sequence
  SAMD9 targeting guide sequence portion
caaugagguuuuccaauuug

SEQ ID NO: 6909 - RNA, 20 nt, Artificial Sequence
  SAMD9 targeting guide sequence portion
caauuugcuucagcuuguau

SEQ ID NO: 6910 - RNA, 20 nt, Artificial Sequence
  SAMD9 targeting guide sequence portion
cauacaagcugaagcaaauu

SEQ ID NO: 6911 - RNA, 20 nt, Artificial Sequence
  SAMD9 targeting guide sequence portion
ccaauuugcuucagcuugua

SEQ ID NO: 6912 - RNA, 20 nt, Artificial Sequence
  SAMD9 targeting guide sequence portion
cugaagcaaauuggaaaacc

SEQ ID NO: 6913 - RNA, 20 nt, Artificial Sequence
  SAMD9 targeting guide sequence portion
gaaauuuagcaaugagguuu

SEQ ID NO: 6914 - RNA, 20 nt, Artificial Sequence
  SAMD9 targeting guide sequence portion
gaagcaaauuggaaaaccuc

SEQ ID NO: 6915 - RNA, 20 nt, Artificial Sequence
  SAMD9 targeting guide sequence portion
gaauucauacaagcugaagc

SEQ ID NO: 6916 - RNA, 20 nt, Artificial Sequence
  SAMD9 targeting guide sequence portion
gagguuuuccaauuugcuuc

SEQ ID NO: 6917 - RNA, 20 nt, Artificial Sequence
  SAMD9 targeting guide sequence portion
gcaaauuggaaaaccucauu

SEQ ID NO: 6918 - RNA, 20 nt, Artificial Sequence
  SAMD9 targeting guide sequence portion
gcaaugagguuuuccaauuu

SEQ ID NO: 6919 - RNA, 20 nt, Artificial Sequence
  SAMD9 targeting guide sequence portion
gcugaagcaaauuggaaaac

SEQ ID NO: 6920 - RNA, 20 nt, Artificial Sequence
  SAMD9 targeting guide sequence portion
gguuuuccaauuugcuucag

SEQ ID NO: 6921 - RNA, 20 nt, Artificial Sequence
  SAMD9 targeting guide sequence portion
guuuuccaauuugcuucagc

SEQ ID NO: 6922 - RNA, 20 nt, Artificial Sequence
  SAMD9 targeting guide sequence portion
uacaagcugaagcaaauugg

SEQ ID NO: 6923 - RNA, 20 nt, Artificial Sequence
  SAMD9 targeting guide sequence portion
uagcaaugagguuuuccaau

SEQ ID NO: 6924 - RNA, 20 nt, Artificial Sequence
  SAMD9 targeting guide sequence portion
ucauacaagcugaagcaaau

SEQ ID NO: 6925 - RNA, 20 nt, Artificial Sequence
  SAMD9 targeting guide sequence portion
uccaauuugcuucagcuugu

SEQ ID NO: 6926 - RNA, 20 nt, Artificial Sequence
  SAMD9 targeting guide sequence portion
ugaaauuuagcaaugagguu

SEQ ID NO: 6927 - RNA, 20 nt, Artificial Sequence
  SAMD9 targeting guide sequence portion
ugaagcaaauuggaaaaccu

SEQ ID NO: 6928 - RNA, 20 nt, Artificial Sequence
  SAMD9 targeting guide sequence portion
ugaauucauacaagcugaag

SEQ ID NO: 6929 - RNA, 20 nt, Artificial Sequence
  SAMD9 targeting guide sequence portion
ugagguuuuccaauuugcuu

SEQ ID NO: 6930 - RNA, 20 nt, Artificial Sequence
  SAMD9 targeting guide sequence portion
uggaaaaccucauugcuaaa

SEQ ID NO: 6931 - RNA, 20 nt, Artificial Sequence
  SAMD9 targeting guide sequence portion
uuagcaaugagguuuuccaa

SEQ ID NO: 6932 - RNA, 20 nt, Artificial Sequence
  SAMD9 targeting guide sequence portion
uucauacaagcugaagcaaa

SEQ ID NO: 6933 - RNA, 20 nt, Artificial Sequence
  SAMD9 targeting guide sequence portion
uuccaauuugcuucagcuug

SEQ ID NO: 6934 - RNA, 20 nt, Artificial Sequence
  SAMD9 targeting guide sequence portion
uuggaaaaccucauugcuaa

SEQ ID NO: 6935 - RNA, 20 nt, Artificial Sequence
  SAMD9 targeting guide sequence portion
uuuagcaaugagguuuucca

SEQ ID NO: 6936 - RNA, 20 nt, Artificial Sequence
  SAMD9 targeting guide sequence portion
uuuccaauuugcuucagcuu

SEQ ID NO: 6937 - RNA, 20 nt, Artificial Sequence
  SAMD9 targeting guide sequence portion
uuuuccaauuugcuucagcu

SEQ ID NO: 6938 - RNA, 21 nt, Artificial Sequence
  SAMD9 targeting guide sequence portion
aaauuggaaaaccucauugcu

SEQ ID NO: 6939 - RNA, 21 nt, Artificial Sequence
  SAMD9 targeting guide sequence portion
aaauuuagcaaugagguuuuc

SEQ ID NO: 6940 - RNA, 21 nt, Artificial Sequence
  SAMD9 targeting guide sequence portion
aagcaaauuggaaaaccucau

SEQ ID NO: 6941 - RNA, 21 nt, Artificial Sequence
  SAMD9 targeting guide sequence portion
aagcugaagcaaauuggaaaa

SEQ ID NO: 6942 - RNA, 21 nt, Artificial Sequence
  SAMD9 targeting guide sequence portion
aaugagguuuuccaauuugcu

SEQ ID NO: 6943 - RNA, 21 nt, Artificial Sequence
  SAMD9 targeting guide sequence portion
aauucauacaagcugaagcaa

SEQ ID NO: 6944 - RNA, 21 nt, Artificial Sequence
  SAMD9 targeting guide sequence portion
aauuggaaaaccucauugcua

SEQ ID NO: 6945 - RNA, 21 nt, Artificial Sequence
  SAMD9 targeting guide sequence portion
aauuuagcaaugagguuuucc

SEQ ID NO: 6946 - RNA, 21 nt, Artificial Sequence
  SAMD9 targeting guide sequence portion
aauuugcuucagcuuguauga

SEQ ID NO: 6947 - RNA, 21 nt, Artificial Sequence
  SAMD9 targeting guide sequence portion
acaagcugaagcaaauuggaa

SEQ ID NO: 6948 - RNA, 21 nt, Artificial Sequence
  SAMD9 targeting guide sequence portion
agcaaauuggaaaaccucauu

SEQ ID NO: 6949 - RNA, 21 nt, Artificial Sequence
  SAMD9 targeting guide sequence portion
agcaaugagguuuuccaauuu

SEQ ID NO: 6950 - RNA, 21 nt, Artificial Sequence
  SAMD9 targeting guide sequence portion
agcugaagcaaauuggaaaac

SEQ ID NO: 6951 - RNA, 21 nt, Artificial Sequence
  SAMD9 targeting guide sequence portion
agguuuuccaauuugcuucag

SEQ ID NO: 6952 - RNA, 21 nt, Artificial Sequence
  SAMD9 targeting guide sequence portion
auacaagcugaagcaaauugg

SEQ ID NO: 6953 - RNA, 21 nt, Artificial Sequence
  SAMD9 targeting guide sequence portion
augaaauuuagcaaugagguu

SEQ ID NO: 6954 - RNA, 21 nt, Artificial Sequence
  SAMD9 targeting guide sequence portion
augagguuuuccaauuugcuu

SEQ ID NO: 6955 - RNA, 21 nt, Artificial Sequence
  SAMD9 targeting guide sequence portion
auucauacaagcugaagcaaa

SEQ ID NO: 6956 - RNA, 21 nt, Artificial Sequence
  SAMD9 targeting guide sequence portion
auuggaaaaccucauugcuaa

SEQ ID NO: 6957 - RNA, 21 nt, Artificial Sequence
  SAMD9 targeting guide sequence portion
auuuagcaaugagguuuucca

SEQ ID NO: 6958 - RNA, 21 nt, Artificial Sequence
  SAMD9 targeting guide sequence portion
caaauuggaaaaccucauugc

SEQ ID NO: 6959 - RNA, 21 nt, Artificial Sequence
  SAMD9 targeting guide sequence portion
caagcugaagcaaauuggaaa

SEQ ID NO: 6960 - RNA, 21 nt, Artificial Sequence
  SAMD9 targeting guide sequence portion
caaugagguuuuccaauuugc

SEQ ID NO: 6961 - RNA, 21 nt, Artificial Sequence
  SAMD9 targeting guide sequence portion
caauuugcuucagcuuguaug

SEQ ID NO: 6962 - RNA, 21 nt, Artificial Sequence
  SAMD9 targeting guide sequence portion
cauacaagcugaagcaaauug

SEQ ID NO: 6963 - RNA, 21 nt, Artificial Sequence
  SAMD9 targeting guide sequence portion
ccaauuugcuucagcuuguau

SEQ ID NO: 6964 - RNA, 21 nt, Artificial Sequence
  SAMD9 targeting guide sequence portion
cugaagcaaauuggaaaaccu

SEQ ID NO: 6965 - RNA, 21 nt, Artificial Sequence
  SAMD9 targeting guide sequence portion
gaaauuuagcaaugagguuuu

SEQ ID NO: 6966 - RNA, 21 nt, Artificial Sequence
  SAMD9 targeting guide sequence portion
gaagcaaauuggaaaaccuca

SEQ ID NO: 6967 - RNA, 21 nt, Artificial Sequence
  SAMD9 targeting guide sequence portion
gaauucauacaagcugaagca

SEQ ID NO: 6968 - RNA, 21 nt, Artificial Sequence
  SAMD9 targeting guide sequence portion
gagguuuuccaauuugcuuca

SEQ ID NO: 6969 - RNA, 21 nt, Artificial Sequence
  SAMD9 targeting guide sequence portion
gaugaaauuuagcaaugaggu

SEQ ID NO: 6970 - RNA, 21 nt, Artificial Sequence
  SAMD9 targeting guide sequence portion
gcaaauuggaaaaccucauug

SEQ ID NO: 6971 - RNA, 21 nt, Artificial Sequence
  SAMD9 targeting guide sequence portion
gcaaugagguuuuccaauuug

SEQ ID NO: 6972 - RNA, 21 nt, Artificial Sequence
  SAMD9 targeting guide sequence portion
gcugaagcaaauuggaaaacc

SEQ ID NO: 6973 - RNA, 21 nt, Artificial Sequence
  SAMD9 targeting guide sequence portion
gguuuuccaauuugcuucagc

SEQ ID NO: 6974 - RNA, 21 nt, Artificial Sequence
  SAMD9 targeting guide sequence portion
gugaauucauacaagcugaag

SEQ ID NO: 6975 - RNA, 21 nt, Artificial Sequence
  SAMD9 targeting guide sequence portion
guuuuccaauuugcuucagcu

SEQ ID NO: 6976 - RNA, 21 nt, Artificial Sequence
  SAMD9 targeting guide sequence portion
uacaagcugaagcaaauugga

SEQ ID NO: 6977 - RNA, 21 nt, Artificial Sequence
  SAMD9 targeting guide sequence portion
uagcaaugagguuuuccaauu

SEQ ID NO: 6978 - RNA, 21 nt, Artificial Sequence
  SAMD9 targeting guide sequence portion
ucauacaagcugaagcaaauu

SEQ ID NO: 6979 - RNA, 21 nt, Artificial Sequence
  SAMD9 targeting guide sequence portion
uccaauuugcuucagcuugua

SEQ ID NO: 6980 - RNA, 21 nt, Artificial Sequence
  SAMD9 targeting guide sequence portion
ugaaauuuagcaaugagguuu

SEQ ID NO: 6981 - RNA, 21 nt, Artificial Sequence
  SAMD9 targeting guide sequence portion
ugaagcaaauuggaaaaccuc

SEQ ID NO: 6982 - RNA, 21 nt, Artificial Sequence
  SAMD9 targeting guide sequence portion
ugaauucauacaagcugaagc

SEQ ID NO: 6983 - RNA, 21 nt, Artificial Sequence
  SAMD9 targeting guide sequence portion
ugagguuuuccaauuugcuuc

SEQ ID NO: 6984 - RNA, 21 nt, Artificial Sequence
  SAMD9 targeting guide sequence portion
uggaaaaccucauugcuaaau

SEQ ID NO: 6985 - RNA, 21 nt, Artificial Sequence
  SAMD9 targeting guide sequence portion
uuagcaaugagguuuuccaau

SEQ ID NO: 6986 - RNA, 21 nt, Artificial Sequence
  SAMD9 targeting guide sequence portion
uucauacaagcugaagcaaau

SEQ ID NO: 6987 - RNA, 21 nt, Artificial Sequence
  SAMD9 targeting guide sequence portion
uuccaauuugcuucagcuugu

SEQ ID NO: 6988 - RNA, 21 nt, Artificial Sequence
  SAMD9 targeting guide sequence portion
uuggaaaaccucauugcuaaa

SEQ ID NO: 6989 - RNA, 21 nt, Artificial Sequence
  SAMD9 targeting guide sequence portion
uuuagcaaugagguuuuccaa

SEQ ID NO: 6990 - RNA, 21 nt, Artificial Sequence
  SAMD9 targeting guide sequence portion
uuuccaauuugcuucagcuug

SEQ ID NO: 6991 - RNA, 21 nt, Artificial Sequence
  SAMD9 targeting guide sequence portion
uuuuccaauuugcuucagcuu

SEQ ID NO: 6992 - RNA, 22 nt, Artificial Sequence
  SAMD9 targeting guide sequence portion
aaauuggaaaaccucauugcua

SEQ ID NO: 6993 - RNA, 22 nt, Artificial Sequence
  SAMD9 targeting guide sequence portion
aaauuuagcaaugagguuuucc

SEQ ID NO: 6994 - RNA, 22 nt, Artificial Sequence
  SAMD9 targeting guide sequence portion
aagcaaauuggaaaaccucauu

SEQ ID NO: 6995 - RNA, 22 nt, Artificial Sequence
  SAMD9 targeting guide sequence portion
aagcugaagcaaauuggaaaac

SEQ ID NO: 6996 - RNA, 22 nt, Artificial Sequence
  SAMD9 targeting guide sequence portion
aaugagguuuuccaauuugcuu

SEQ ID NO: 6997 - RNA, 22 nt, Artificial Sequence
  SAMD9 targeting guide sequence portion
aauucauacaagcugaagcaaa

SEQ ID NO: 6998 - RNA, 22 nt, Artificial Sequence
  SAMD9 targeting guide sequence portion
aauuggaaaaccucauugcuaa

SEQ ID NO: 6999 - RNA, 22 nt, Artificial Sequence
  SAMD9 targeting guide sequence portion
aauuuagcaaugagguuuucca

SEQ ID NO: 7000 - RNA, 22 nt, Artificial Sequence
  SAMD9 targeting guide sequence portion
aauuugcuucagcuuguaugaa

SEQ ID NO: 7001 - RNA, 22 nt, Artificial Sequence
  SAMD9 targeting guide sequence portion
acaagcugaagcaaauuggaaa

SEQ ID NO: 7002 - RNA, 22 nt, Artificial Sequence
  SAMD9 targeting guide sequence portion
agaugaaauuuagcaaugaggu

SEQ ID NO: 7003 - RNA, 22 nt, Artificial Sequence
  SAMD9 targeting guide sequence portion
agcaaauuggaaaaccucauug

SEQ ID NO: 7004 - RNA, 22 nt, Artificial Sequence
  SAMD9 targeting guide sequence portion
agcaaugagguuuuccaauuug

SEQ ID NO: 7005 - RNA, 22 nt, Artificial Sequence
  SAMD9 targeting guide sequence portion
agcugaagcaaauuggaaaacc

SEQ ID NO: 7006 - RNA, 22 nt, Artificial Sequence
  SAMD9 targeting guide sequence portion
agguuuuccaauuugcuucagc

SEQ ID NO: 7007 - RNA, 22 nt, Artificial Sequence
  SAMD9 targeting guide sequence portion
auacaagcugaagcaaauugga

SEQ ID NO: 7008 - RNA, 22 nt, Artificial Sequence
  SAMD9 targeting guide sequence portion
augaaauuuagcaaugagguuu

SEQ ID NO: 7009 - RNA, 22 nt, Artificial Sequence
  SAMD9 targeting guide sequence portion
augagguuuuccaauuugcuuc

SEQ ID NO: 7010 - RNA, 22 nt, Artificial Sequence
  SAMD9 targeting guide sequence portion
auucauacaagcugaagcaaau

SEQ ID NO: 7011 - RNA, 22 nt, Artificial Sequence
  SAMD9 targeting guide sequence portion
auuggaaaaccucauugcuaaa

SEQ ID NO: 7012 - RNA, 22 nt, Artificial Sequence
  SAMD9 targeting guide sequence portion
auuuagcaaugagguuuuccaa

SEQ ID NO: 7013 - RNA, 22 nt, Artificial Sequence
  SAMD9 targeting guide sequence portion
caaauuggaaaaccucauugcu

SEQ ID NO: 7014 - RNA, 22 nt, Artificial Sequence
  SAMD9 targeting guide sequence portion
caagcugaagcaaauuggaaaa

SEQ ID NO: 7015 - RNA, 22 nt, Artificial Sequence
  SAMD9 targeting guide sequence portion
caaugagguuuuccaauuugcu

SEQ ID NO: 7016 - RNA, 22 nt, Artificial Sequence
  SAMD9 targeting guide sequence portion
caauuugcuucagcuuguauga

SEQ ID NO: 7017 - RNA, 22 nt, Artificial Sequence
  SAMD9 targeting guide sequence portion
cauacaagcugaagcaaauugg

SEQ ID NO: 7018 - RNA, 22 nt, Artificial Sequence
  SAMD9 targeting guide sequence portion
ccaauuugcuucagcuuguaug

SEQ ID NO: 7019 - RNA, 22 nt, Artificial Sequence
  SAMD9 targeting guide sequence portion
cgugaauucauacaagcugaag

SEQ ID NO: 7020 - RNA, 22 nt, Artificial Sequence
  SAMD9 targeting guide sequence portion
cugaagcaaauuggaaaaccuc

SEQ ID NO: 7021 - RNA, 22 nt, Artificial Sequence
  SAMD9 targeting guide sequence portion
gaaauuuagcaaugagguuuuc

SEQ ID NO: 7022 - RNA, 22 nt, Artificial Sequence
  SAMD9 targeting guide sequence portion
gaagcaaauuggaaaaccucau

SEQ ID NO: 7023 - RNA, 22 nt, Artificial Sequence
  SAMD9 targeting guide sequence portion
gaauucauacaagcugaagcaa

SEQ ID NO: 7024 - RNA, 22 nt, Artificial Sequence
  SAMD9 targeting guide sequence portion
gagguuuuccaauuugcuucag

SEQ ID NO: 7025 - RNA, 22 nt, Artificial Sequence
  SAMD9 targeting guide sequence portion
gaugaaauuuagcaaugagguu

SEQ ID NO: 7026 - RNA, 22 nt, Artificial Sequence
  SAMD9 targeting guide sequence portion
gcaaauuggaaaaccucauugc

SEQ ID NO: 7027 - RNA, 22 nt, Artificial Sequence
  SAMD9 targeting guide sequence portion
gcaaugagguuuuccaauuugc

SEQ ID NO: 7028 - RNA, 22 nt, Artificial Sequence
  SAMD9 targeting guide sequence portion
gcugaagcaaauuggaaaaccu

SEQ ID NO: 7029 - RNA, 22 nt, Artificial Sequence
  SAMD9 targeting guide sequence portion
gguuuuccaauuugcuucagcu

SEQ ID NO: 7030 - RNA, 22 nt, Artificial Sequence
  SAMD9 targeting guide sequence portion
gugaauucauacaagcugaagc

SEQ ID NO: 7031 - RNA, 22 nt, Artificial Sequence
  SAMD9 targeting guide sequence portion
guuuuccaauuugcuucagcuu

SEQ ID NO: 7032 - RNA, 22 nt, Artificial Sequence
  SAMD9 targeting guide sequence portion
uacaagcugaagcaaauuggaa

SEQ ID NO: 7033 - RNA, 22 nt, Artificial Sequence
  SAMD9 targeting guide sequence portion
uagcaaugagguuuuccaauuu

SEQ ID NO: 7034 - RNA, 22 nt, Artificial Sequence
  SAMD9 targeting guide sequence portion
ucauacaagcugaagcaaauug

SEQ ID NO: 7035 - RNA, 22 nt, Artificial Sequence
  SAMD9 targeting guide sequence portion
uccaauuugcuucagcuuguau

SEQ ID NO: 7036 - RNA, 22 nt, Artificial Sequence
  SAMD9 targeting guide sequence portion
ugaaauuuagcaaugagguuuu

SEQ ID NO: 7037 - RNA, 22 nt, Artificial Sequence
  SAMD9 targeting guide sequence portion
ugaagcaaauuggaaaaccuca

SEQ ID NO: 7038 - RNA, 22 nt, Artificial Sequence
  SAMD9 targeting guide sequence portion
ugaauucauacaagcugaagca

SEQ ID NO: 7039 - RNA, 22 nt, Artificial Sequence
  SAMD9 targeting guide sequence portion
ugagguuuuccaauuugcuuca

SEQ ID NO: 7040 - RNA, 22 nt, Artificial Sequence
  SAMD9 targeting guide sequence portion
uggaaaaccucauugcuaaauu

SEQ ID NO: 7041 - RNA, 22 nt, Artificial Sequence
  SAMD9 targeting guide sequence portion
uuagcaaugagguuuuccaauu

SEQ ID NO: 7042 - RNA, 22 nt, Artificial Sequence
  SAMD9 targeting guide sequence portion
uucauacaagcugaagcaaauu

SEQ ID NO: 7043 - RNA, 22 nt, Artificial Sequence
  SAMD9 targeting guide sequence portion
uuccaauuugcuucagcuugua

SEQ ID NO: 7044 - RNA, 22 nt, Artificial Sequence
  SAMD9 targeting guide sequence portion
uuggaaaaccucauugcuaaau

SEQ ID NO: 7045 - RNA, 22 nt, Artificial Sequence
  SAMD9 targeting guide sequence portion
uuuagcaaugagguuuuccaau

SEQ ID NO: 7046 - RNA, 22 nt, Artificial Sequence
  SAMD9 targeting guide sequence portion
uuuccaauuugcuucagcuugu

SEQ ID NO: 7047 - RNA, 22 nt, Artificial Sequence
  SAMD9 targeting guide sequence portion
uuuuccaauuugcuucagcuug

SEQ ID NO: 7048 - RNA, 20 nt, Artificial Sequence
  SAMD9 targeting guide sequence portion
aaagccuucacaaauacagc

SEQ ID NO: 7049 - RNA, 20 nt, Artificial Sequence
  SAMD9 targeting guide sequence portion
aaauacagcaccagccacag

SEQ ID NO: 7050 - RNA, 20 nt, Artificial Sequence
  SAMD9 targeting guide sequence portion
aagccuucacaaauacagca

SEQ ID NO: 7051 - RNA, 20 nt, Artificial Sequence
  SAMD9 targeting guide sequence portion
aauacagcaccagccacaga

SEQ ID NO: 7052 - RNA, 20 nt, Artificial Sequence
  SAMD9 targeting guide sequence portion
acaaauacagcaccagccac

SEQ ID NO: 7053 - RNA, 20 nt, Artificial Sequence
  SAMD9 targeting guide sequence portion
acagcaccagccacagaaga

SEQ ID NO: 7054 - RNA, 20 nt, Artificial Sequence
  SAMD9 targeting guide sequence portion
acauccucuucuguggcugg

SEQ ID NO: 7055 - RNA, 20 nt, Artificial Sequence
  SAMD9 targeting guide sequence portion
accagccacagaagaggaug

SEQ ID NO: 7056 - RNA, 20 nt, Artificial Sequence
  SAMD9 targeting guide sequence portion
agcaccagccacagaagagg

SEQ ID NO: 7057 - RNA, 20 nt, Artificial Sequence
  SAMD9 targeting guide sequence portion
agccuucacaaauacagcac

SEQ ID NO: 7058 - RNA, 20 nt, Artificial Sequence
  SAMD9 targeting guide sequence portion
auacagcaccagccacagaa

SEQ ID NO: 7059 - RNA, 20 nt, Artificial Sequence
  SAMD9 targeting guide sequence portion
auccucuucuguggcuggug

SEQ ID NO: 7060 - RNA, 20 nt, Artificial Sequence
  SAMD9 targeting guide sequence portion
aucuugacauccucuucugu

SEQ ID NO: 7061 - RNA, 20 nt, Artificial Sequence
  SAMD9 targeting guide sequence portion
auucaaagccuucacaaaua

SEQ ID NO: 7062 - RNA, 20 nt, Artificial Sequence
  SAMD9 targeting guide sequence portion
caaagccuucacaaauacag

SEQ ID NO: 7063 - RNA, 20 nt, Artificial Sequence
  SAMD9 targeting guide sequence portion
caaauacagcaccagccaca

SEQ ID NO: 7064 - RNA, 20 nt, Artificial Sequence
  SAMD9 targeting guide sequence portion
cacaaauacagcaccagcca

SEQ ID NO: 7065 - RNA, 20 nt, Artificial Sequence
  SAMD9 targeting guide sequence portion
caccagccacagaagaggau

SEQ ID NO: 7066 - RNA, 20 nt, Artificial Sequence
  SAMD9 targeting guide sequence portion
cagcaccagccacagaagag

SEQ ID NO: 7067 - RNA, 20 nt, Artificial Sequence
  SAMD9 targeting guide sequence portion
cauccucuucuguggcuggu

SEQ ID NO: 7068 - RNA, 20 nt, Artificial Sequence
  SAMD9 targeting guide sequence portion
ccagccacagaagaggaugu

SEQ ID NO: 7069 - RNA, 20 nt, Artificial Sequence
  SAMD9 targeting guide sequence portion
ccucuucuguggcuggugcu

SEQ ID NO: 7070 - RNA, 20 nt, Artificial Sequence
  SAMD9 targeting guide sequence portion
ccuucacaaauacagcacca

SEQ ID NO: 7071 - RNA, 20 nt, Artificial Sequence
  SAMD9 targeting guide sequence portion
cucuucuguggcuggugcug

SEQ ID NO: 7072 - RNA, 20 nt, Artificial Sequence
  SAMD9 targeting guide sequence portion
cuggugcuguauuugugaag

SEQ ID NO: 7073 - RNA, 20 nt, Artificial Sequence
  SAMD9 targeting guide sequence portion
cuguggcuggugcuguauuu

SEQ ID NO: 7074 - RNA, 20 nt, Artificial Sequence
  SAMD9 targeting guide sequence portion
cuucacaaauacagcaccag

SEQ ID NO: 7075 - RNA, 20 nt, Artificial Sequence
  SAMD9 targeting guide sequence portion
cuucuguggcuggugcugua

SEQ ID NO: 7076 - RNA, 20 nt, Artificial Sequence
  SAMD9 targeting guide sequence portion
cuugacauccucuucugugg

SEQ ID NO: 7077 - RNA, 20 nt, Artificial Sequence
  SAMD9 targeting guide sequence portion
gacauccucuucuguggcug

SEQ ID NO: 7078 - RNA, 20 nt, Artificial Sequence
  SAMD9 targeting guide sequence portion
gcaccagccacagaagagga

SEQ ID NO: 7079 - RNA, 20 nt, Artificial Sequence
  SAMD9 targeting guide sequence portion
gccuucacaaauacagcacc

SEQ ID NO: 7080 - RNA, 20 nt, Artificial Sequence
  SAMD9 targeting guide sequence portion
gcuggugcuguauuugugaa

SEQ ID NO: 7081 - RNA, 20 nt, Artificial Sequence
  SAMD9 targeting guide sequence portion
ggcuggugcuguauuuguga

SEQ ID NO: 7082 - RNA, 20 nt, Artificial Sequence
  SAMD9 targeting guide sequence portion
ggugcuguauuugugaaggc

SEQ ID NO: 7083 - RNA, 20 nt, Artificial Sequence
  SAMD9 targeting guide sequence portion
gugcuguauuugugaaggcu

SEQ ID NO: 7084 - RNA, 20 nt, Artificial Sequence
  SAMD9 targeting guide sequence portion
guggcuggugcuguauuugu

SEQ ID NO: 7085 - RNA, 20 nt, Artificial Sequence
  SAMD9 targeting guide sequence portion
uacagcaccagccacagaag

SEQ ID NO: 7086 - RNA, 20 nt, Artificial Sequence
  SAMD9 targeting guide sequence portion
ucaaagccuucacaaauaca

SEQ ID NO: 7087 - RNA, 20 nt, Artificial Sequence
  SAMD9 targeting guide sequence portion
ucacaaauacagcaccagcc

SEQ ID NO: 7088 - RNA, 20 nt, Artificial Sequence
  SAMD9 targeting guide sequence portion
uccucuucuguggcuggugc

SEQ ID NO: 7089 - RNA, 20 nt, Artificial Sequence
  SAMD9 targeting guide sequence portion
ucuguggcuggugcuguauu

SEQ ID NO: 7090 - RNA, 20 nt, Artificial Sequence
  SAMD9 targeting guide sequence portion
ucuucuguggcuggugcugu

SEQ ID NO: 7091 - RNA, 20 nt, Artificial Sequence
  SAMD9 targeting guide sequence portion
ucuugacauccucuucugug

SEQ ID NO: 7092 - RNA, 20 nt, Artificial Sequence
  SAMD9 targeting guide sequence portion
ugacauccucuucuguggcu

SEQ ID NO: 7093 - RNA, 20 nt, Artificial Sequence
  SAMD9 targeting guide sequence portion
uggcuggugcuguauuugug

SEQ ID NO: 7094 - RNA, 20 nt, Artificial Sequence
  SAMD9 targeting guide sequence portion
uggugcuguauuugugaagg

SEQ ID NO: 7095 - RNA, 20 nt, Artificial Sequence
  SAMD9 targeting guide sequence portion
uguggcuggugcuguauuug

SEQ ID NO: 7096 - RNA, 20 nt, Artificial Sequence
  SAMD9 targeting guide sequence portion
uucaaagccuucacaaauac

SEQ ID NO: 7097 - RNA, 20 nt, Artificial Sequence
  SAMD9 targeting guide sequence portion
uucacaaauacagcaccagc

SEQ ID NO: 7098 - RNA, 20 nt, Artificial Sequence
  SAMD9 targeting guide sequence portion
uucuguggcuggugcuguau

SEQ ID NO: 7099 - RNA, 20 nt, Artificial Sequence
  SAMD9 targeting guide sequence portion
uugacauccucuucuguggc

SEQ ID NO: 7100 - RNA, 21 nt, Artificial Sequence
  SAMD9 targeting guide sequence portion
aaagccuucacaaauacagca

SEQ ID NO: 7101 - RNA, 21 nt, Artificial Sequence
  SAMD9 targeting guide sequence portion
aaauacagcaccagccacaga

SEQ ID NO: 7102 - RNA, 21 nt, Artificial Sequence
  SAMD9 targeting guide sequence portion
aagccuucacaaauacagcac

SEQ ID NO: 7103 - RNA, 21 nt, Artificial Sequence
  SAMD9 targeting guide sequence portion
aauacagcaccagccacagaa

SEQ ID NO: 7104 - RNA, 21 nt, Artificial Sequence
  SAMD9 targeting guide sequence portion
aauucaaagccuucacaaaua

SEQ ID NO: 7105 - RNA, 21 nt, Artificial Sequence
  SAMD9 targeting guide sequence portion
acaaauacagcaccagccaca

SEQ ID NO: 7106 - RNA, 21 nt, Artificial Sequence
  SAMD9 targeting guide sequence portion
acagcaccagccacagaagag

SEQ ID NO: 7107 - RNA, 21 nt, Artificial Sequence
  SAMD9 targeting guide sequence portion
acauccucuucuguggcuggu

SEQ ID NO: 7108 - RNA, 21 nt, Artificial Sequence
  SAMD9 targeting guide sequence portion
accagccacagaagaggaugu

SEQ ID NO: 7109 - RNA, 21 nt, Artificial Sequence
  SAMD9 targeting guide sequence portion
agcaccagccacagaagagga

SEQ ID NO: 7110 - RNA, 21 nt, Artificial Sequence
  SAMD9 targeting guide sequence portion
agccuucacaaauacagcacc

SEQ ID NO: 7111 - RNA, 21 nt, Artificial Sequence
  SAMD9 targeting guide sequence portion
auacagcaccagccacagaag

SEQ ID NO: 7112 - RNA, 21 nt, Artificial Sequence
  SAMD9 targeting guide sequence portion
auccucuucuguggcuggugc

SEQ ID NO: 7113 - RNA, 21 nt, Artificial Sequence
  SAMD9 targeting guide sequence portion
aucuugacauccucuucugug

SEQ ID NO: 7114 - RNA, 21 nt, Artificial Sequence
  SAMD9 targeting guide sequence portion
auucaaagccuucacaaauac

SEQ ID NO: 7115 - RNA, 21 nt, Artificial Sequence
  SAMD9 targeting guide sequence portion
caaagccuucacaaauacagc

SEQ ID NO: 7116 - RNA, 21 nt, Artificial Sequence
  SAMD9 targeting guide sequence portion
caaauacagcaccagccacag

SEQ ID NO: 7117 - RNA, 21 nt, Artificial Sequence
  SAMD9 targeting guide sequence portion
cacaaauacagcaccagccac

SEQ ID NO: 7118 - RNA, 21 nt, Artificial Sequence
  SAMD9 targeting guide sequence portion
caccagccacagaagaggaug

SEQ ID NO: 7119 - RNA, 21 nt, Artificial Sequence
  SAMD9 targeting guide sequence portion
cagcaccagccacagaagagg

SEQ ID NO: 7120 - RNA, 21 nt, Artificial Sequence
  SAMD9 targeting guide sequence portion
cauccucuucuguggcuggug

SEQ ID NO: 7121 - RNA, 21 nt, Artificial Sequence
  SAMD9 targeting guide sequence portion
caucuugacauccucuucugu

SEQ ID NO: 7122 - RNA, 21 nt, Artificial Sequence
  SAMD9 targeting guide sequence portion
ccagccacagaagaggauguc

SEQ ID NO: 7123 - RNA, 21 nt, Artificial Sequence
  SAMD9 targeting guide sequence portion
ccucuucuguggcuggugcug

SEQ ID NO: 7124 - RNA, 21 nt, Artificial Sequence
  SAMD9 targeting guide sequence portion
ccuucacaaauacagcaccag

SEQ ID NO: 7125 - RNA, 21 nt, Artificial Sequence
  SAMD9 targeting guide sequence portion
cucuucuguggcuggugcugu

SEQ ID NO: 7126 - RNA, 21 nt, Artificial Sequence
  SAMD9 targeting guide sequence portion
cuggugcuguauuugugaagg

SEQ ID NO: 7127 - RNA, 21 nt, Artificial Sequence
  SAMD9 targeting guide sequence portion
cuguggcuggugcuguauuug

SEQ ID NO: 7128 - RNA, 21 nt, Artificial Sequence
  SAMD9 targeting guide sequence portion
cuucacaaauacagcaccagc

SEQ ID NO: 7129 - RNA, 21 nt, Artificial Sequence
  SAMD9 targeting guide sequence portion
cuucuguggcuggugcuguau

SEQ ID NO: 7130 - RNA, 21 nt, Artificial Sequence
  SAMD9 targeting guide sequence portion
cuugacauccucuucuguggc

SEQ ID NO: 7131 - RNA, 21 nt, Artificial Sequence
  SAMD9 targeting guide sequence portion
gacauccucuucuguggcugg

SEQ ID NO: 7132 - RNA, 21 nt, Artificial Sequence
  SAMD9 targeting guide sequence portion
gcaccagccacagaagaggau

SEQ ID NO: 7133 - RNA, 21 nt, Artificial Sequence
  SAMD9 targeting guide sequence portion
gccuucacaaauacagcacca

SEQ ID NO: 7134 - RNA, 21 nt, Artificial Sequence
  SAMD9 targeting guide sequence portion
gcuggugcuguauuugugaag

SEQ ID NO: 7135 - RNA, 21 nt, Artificial Sequence
  SAMD9 targeting guide sequence portion
ggcuggugcuguauuugugaa

SEQ ID NO: 7136 - RNA, 21 nt, Artificial Sequence
  SAMD9 targeting guide sequence portion
ggugcuguauuugugaaggcu

SEQ ID NO: 7137 - RNA, 21 nt, Artificial Sequence
  SAMD9 targeting guide sequence portion
gugcuguauuugugaaggcuu

SEQ ID NO: 7138 - RNA, 21 nt, Artificial Sequence
  SAMD9 targeting guide sequence portion
guggcuggugcuguauuugug

SEQ ID NO: 7139 - RNA, 21 nt, Artificial Sequence
  SAMD9 targeting guide sequence portion
uacagcaccagccacagaaga

SEQ ID NO: 7140 - RNA, 21 nt, Artificial Sequence
  SAMD9 targeting guide sequence portion
ucaaagccuucacaaauacag

SEQ ID NO: 7141 - RNA, 21 nt, Artificial Sequence
  SAMD9 targeting guide sequence portion
ucacaaauacagcaccagcca

SEQ ID NO: 7142 - RNA, 21 nt, Artificial Sequence
  SAMD9 targeting guide sequence portion
uccucuucuguggcuggugcu

SEQ ID NO: 7143 - RNA, 21 nt, Artificial Sequence
  SAMD9 targeting guide sequence portion
ucuguggcuggugcuguauuu

SEQ ID NO: 7144 - RNA, 21 nt, Artificial Sequence
  SAMD9 targeting guide sequence portion
ucuucuguggcuggugcugua

SEQ ID NO: 7145 - RNA, 21 nt, Artificial Sequence
  SAMD9 targeting guide sequence portion
ucuugacauccucuucugugg

SEQ ID NO: 7146 - RNA, 21 nt, Artificial Sequence
  SAMD9 targeting guide sequence portion
ugacauccucuucuguggcug

SEQ ID NO: 7147 - RNA, 21 nt, Artificial Sequence
  SAMD9 targeting guide sequence portion
uggcuggugcuguauuuguga

SEQ ID NO: 7148 - RNA, 21 nt, Artificial Sequence
  SAMD9 targeting guide sequence portion
uggugcuguauuugugaaggc

SEQ ID NO: 7149 - RNA, 21 nt, Artificial Sequence
  SAMD9 targeting guide sequence portion
uguggcuggugcuguauuugu

SEQ ID NO: 7150 - RNA, 21 nt, Artificial Sequence
  SAMD9 targeting guide sequence portion
uucaaagccuucacaaauaca

SEQ ID NO: 7151 - RNA, 21 nt, Artificial Sequence
  SAMD9 targeting guide sequence portion
uucacaaauacagcaccagcc

SEQ ID NO: 7152 - RNA, 21 nt, Artificial Sequence
  SAMD9 targeting guide sequence portion
uucuguggcuggugcuguauu

SEQ ID NO: 7153 - RNA, 21 nt, Artificial Sequence
  SAMD9 targeting guide sequence portion
uugacauccucuucuguggcu

SEQ ID NO: 7154 - RNA, 22 nt, Artificial Sequence
  SAMD9 targeting guide sequence portion
aaagccuucacaaauacagcac

SEQ ID NO: 7155 - RNA, 22 nt, Artificial Sequence
  SAMD9 targeting guide sequence portion
aaauacagcaccagccacagaa

SEQ ID NO: 7156 - RNA, 22 nt, Artificial Sequence
  SAMD9 targeting guide sequence portion
aagccuucacaaauacagcacc

SEQ ID NO: 7157 - RNA, 22 nt, Artificial Sequence
  SAMD9 targeting guide sequence portion
aauacagcaccagccacagaag

SEQ ID NO: 7158 - RNA, 22 nt, Artificial Sequence
  SAMD9 targeting guide sequence portion
aauucaaagccuucacaaauac

SEQ ID NO: 7159 - RNA, 22 nt, Artificial Sequence
  SAMD9 targeting guide sequence portion
acaaauacagcaccagccacag

SEQ ID NO: 7160 - RNA, 22 nt, Artificial Sequence
  SAMD9 targeting guide sequence portion
acagcaccagccacagaagagg

SEQ ID NO: 7161 - RNA, 22 nt, Artificial Sequence
  SAMD9 targeting guide sequence portion
acauccucuucuguggcuggug

SEQ ID NO: 7162 - RNA, 22 nt, Artificial Sequence
  SAMD9 targeting guide sequence portion
accagccacagaagaggauguc

SEQ ID NO: 7163 - RNA, 22 nt, Artificial Sequence
  SAMD9 targeting guide sequence portion
agcaccagccacagaagaggau

SEQ ID NO: 7164 - RNA, 22 nt, Artificial Sequence
  SAMD9 targeting guide sequence portion
agccuucacaaauacagcacca

SEQ ID NO: 7165 - RNA, 22 nt, Artificial Sequence
  SAMD9 targeting guide sequence portion
auacagcaccagccacagaaga

SEQ ID NO: 7166 - RNA, 22 nt, Artificial Sequence
  SAMD9 targeting guide sequence portion
auccucuucuguggcuggugcu

SEQ ID NO: 7167 - RNA, 22 nt, Artificial Sequence
  SAMD9 targeting guide sequence portion
aucuugacauccucuucugugg

SEQ ID NO: 7168 - RNA, 22 nt, Artificial Sequence
  SAMD9 targeting guide sequence portion
auucaaagccuucacaaauaca

SEQ ID NO: 7169 - RNA, 22 nt, Artificial Sequence
  SAMD9 targeting guide sequence portion
caaagccuucacaaauacagca

SEQ ID NO: 7170 - RNA, 22 nt, Artificial Sequence
  SAMD9 targeting guide sequence portion
caaauacagcaccagccacaga

SEQ ID NO: 7171 - RNA, 22 nt, Artificial Sequence
  SAMD9 targeting guide sequence portion
cacaaauacagcaccagccaca

SEQ ID NO: 7172 - RNA, 22 nt, Artificial Sequence
  SAMD9 targeting guide sequence portion
caccagccacagaagaggaugu

SEQ ID NO: 7173 - RNA, 22 nt, Artificial Sequence
  SAMD9 targeting guide sequence portion
cagcaccagccacagaagagga

SEQ ID NO: 7174 - RNA, 22 nt, Artificial Sequence
  SAMD9 targeting guide sequence portion
cauccucuucuguggcuggugc

SEQ ID NO: 7175 - RNA, 22 nt, Artificial Sequence
  SAMD9 targeting guide sequence portion
caucuugacauccucuucugug

SEQ ID NO: 7176 - RNA, 22 nt, Artificial Sequence
  SAMD9 targeting guide sequence portion
ccagccacagaagaggauguca

SEQ ID NO: 7177 - RNA, 22 nt, Artificial Sequence
  SAMD9 targeting guide sequence portion
ccucuucuguggcuggugcugu

SEQ ID NO: 7178 - RNA, 22 nt, Artificial Sequence
  SAMD9 targeting guide sequence portion
ccuucacaaauacagcaccagc

SEQ ID NO: 7179 - RNA, 22 nt, Artificial Sequence
  SAMD9 targeting guide sequence portion
cucuucuguggcuggugcugua

SEQ ID NO: 7180 - RNA, 22 nt, Artificial Sequence
  SAMD9 targeting guide sequence portion
cuggugcuguauuugugaaggc

SEQ ID NO: 7181 - RNA, 22 nt, Artificial Sequence
  SAMD9 targeting guide sequence portion
cuguggcuggugcuguauuugu

SEQ ID NO: 7182 - RNA, 22 nt, Artificial Sequence
  SAMD9 targeting guide sequence portion
cuucacaaauacagcaccagcc

SEQ ID NO: 7183 - RNA, 22 nt, Artificial Sequence
  SAMD9 targeting guide sequence portion
cuucuguggcuggugcuguauu

SEQ ID NO: 7184 - RNA, 22 nt, Artificial Sequence
  SAMD9 targeting guide sequence portion
cuugacauccucuucuguggcu

SEQ ID NO: 7185 - RNA, 22 nt, Artificial Sequence
  SAMD9 targeting guide sequence portion
gaauucaaagccuucacaaaua

SEQ ID NO: 7186 - RNA, 22 nt, Artificial Sequence
  SAMD9 targeting guide sequence portion
gacauccucuucuguggcuggu

SEQ ID NO: 7187 - RNA, 22 nt, Artificial Sequence
  SAMD9 targeting guide sequence portion
gcaccagccacagaagaggaug

SEQ ID NO: 7188 - RNA, 22 nt, Artificial Sequence
  SAMD9 targeting guide sequence portion
gccuucacaaauacagcaccag

SEQ ID NO: 7189 - RNA, 22 nt, Artificial Sequence
  SAMD9 targeting guide sequence portion
gcuggugcuguauuugugaagg

SEQ ID NO: 7190 - RNA, 22 nt, Artificial Sequence
  SAMD9 targeting guide sequence portion
ggcuggugcuguauuugugaag

SEQ ID NO: 7191 - RNA, 22 nt, Artificial Sequence
  SAMD9 targeting guide sequence portion
ggugcuguauuugugaaggcuu

SEQ ID NO: 7192 - RNA, 22 nt, Artificial Sequence
  SAMD9 targeting guide sequence portion
gugcuguauuugugaaggcuuu

SEQ ID NO: 7193 - RNA, 22 nt, Artificial Sequence
  SAMD9 targeting guide sequence portion
guggcuggugcuguauuuguga

SEQ ID NO: 7194 - RNA, 22 nt, Artificial Sequence
  SAMD9 targeting guide sequence portion
uacagcaccagccacagaagag

SEQ ID NO: 7195 - RNA, 22 nt, Artificial Sequence
  SAMD9 targeting guide sequence portion
ucaaagccuucacaaauacagc

SEQ ID NO: 7196 - RNA, 22 nt, Artificial Sequence
  SAMD9 targeting guide sequence portion
ucacaaauacagcaccagccac

SEQ ID NO: 7197 - RNA, 22 nt, Artificial Sequence
  SAMD9 targeting guide sequence portion
ucaucuugacauccucuucugu

SEQ ID NO: 7198 - RNA, 22 nt, Artificial Sequence
  SAMD9 targeting guide sequence portion
uccucuucuguggcuggugcug

SEQ ID NO: 7199 - RNA, 22 nt, Artificial Sequence
  SAMD9 targeting guide sequence portion
ucuguggcuggugcuguauuug

SEQ ID NO: 7200 - RNA, 22 nt, Artificial Sequence
  SAMD9 targeting guide sequence portion
ucuucuguggcuggugcuguau

SEQ ID NO: 7201 - RNA, 22 nt, Artificial Sequence
  SAMD9 targeting guide sequence portion
ucuugacauccucuucuguggc

SEQ ID NO: 7202 - RNA, 22 nt, Artificial Sequence
  SAMD9 targeting guide sequence portion
ugacauccucuucuguggcugg

SEQ ID NO: 7203 - RNA, 22 nt, Artificial Sequence
  SAMD9 targeting guide sequence portion
uggcuggugcuguauuugugaa

SEQ ID NO: 7204 - RNA, 22 nt, Artificial Sequence
  SAMD9 targeting guide sequence portion
uggugcuguauuugugaaggcu

SEQ ID NO: 7205 - RNA, 22 nt, Artificial Sequence
  SAMD9 targeting guide sequence portion
uguggcuggugcuguauuugug

SEQ ID NO: 7206 - RNA, 22 nt, Artificial Sequence
  SAMD9 targeting guide sequence portion
uucaaagccuucacaaauacag

SEQ ID NO: 7207 - RNA, 22 nt, Artificial Sequence
  SAMD9 targeting guide sequence portion
uucacaaauacagcaccagcca

SEQ ID NO: 7208 - RNA, 22 nt, Artificial Sequence
  SAMD9 targeting guide sequence portion
uucuguggcuggugcuguauuu

SEQ ID NO: 7209 - RNA, 22 nt, Artificial Sequence
  SAMD9 targeting guide sequence portion
uugacauccucuucuguggcug

SEQ ID NO: 7210 - RNA, 20 nt, Artificial Sequence
  SAMD9 targeting guide sequence portion
aaaauagauuauacaaagga

SEQ ID NO: 7211 - RNA, 20 nt, Artificial Sequence
  SAMD9 targeting guide sequence portion
aaaggaaagguaaccaucca

SEQ ID NO: 7212 - RNA, 20 nt, Artificial Sequence
  SAMD9 targeting guide sequence portion
aaagguaaccauccauagac

SEQ ID NO: 7213 - RNA, 20 nt, Artificial Sequence
  SAMD9 targeting guide sequence portion
aaauagauuauacaaaggaa

SEQ ID NO: 7214 - RNA, 20 nt, Artificial Sequence
  SAMD9 targeting guide sequence portion
aaggaaagguaaccauccau

SEQ ID NO: 7215 - RNA, 20 nt, Artificial Sequence
  SAMD9 targeting guide sequence portion
aagguaaccauccauagacc

SEQ ID NO: 7216 - RNA, 20 nt, Artificial Sequence
  SAMD9 targeting guide sequence portion
aauagauuauacaaaggaaa

SEQ ID NO: 7217 - RNA, 20 nt, Artificial Sequence
  SAMD9 targeting guide sequence portion
acaaaggaaagguaaccauc

SEQ ID NO: 7218 - RNA, 20 nt, Artificial Sequence
  SAMD9 targeting guide sequence portion
acacaugucaggucuaugga

SEQ ID NO: 7219 - RNA, 20 nt, Artificial Sequence
  SAMD9 targeting guide sequence portion
acaugucaggucuauggaug

SEQ ID NO: 7220 - RNA, 20 nt, Artificial Sequence
  SAMD9 targeting guide sequence portion
accuuuccuuuguauaaucu

SEQ ID NO: 7221 - RNA, 20 nt, Artificial Sequence
  SAMD9 targeting guide sequence portion
agauuauacaaaggaaaggu

SEQ ID NO: 7222 - RNA, 20 nt, Artificial Sequence
  SAMD9 targeting guide sequence portion
aggaaagguaaccauccaua

SEQ ID NO: 7223 - RNA, 20 nt, Artificial Sequence
  SAMD9 targeting guide sequence portion
agguaaccauccauagaccu

SEQ ID NO: 7224 - RNA, 20 nt, Artificial Sequence
  SAMD9 targeting guide sequence portion
aggucuauggaugguuaccu

SEQ ID NO: 7225 - RNA, 20 nt, Artificial Sequence
  SAMD9 targeting guide sequence portion
auacaaaggaaagguaacca

SEQ ID NO: 7226 - RNA, 20 nt, Artificial Sequence
  SAMD9 targeting guide sequence portion
auagauuauacaaaggaaag

SEQ ID NO: 7227 - RNA, 20 nt, Artificial Sequence
  SAMD9 targeting guide sequence portion
auggaugguuaccuuuccuu

SEQ ID NO: 7228 - RNA, 20 nt, Artificial Sequence
  SAMD9 targeting guide sequence portion
augguuaccuuuccuuugua

SEQ ID NO: 7229 - RNA, 20 nt, Artificial Sequence
  SAMD9 targeting guide sequence portion
augucaggucuauggauggu

SEQ ID NO: 7230 - RNA, 20 nt, Artificial Sequence
  SAMD9 targeting guide sequence portion
auuauacaaaggaaagguaa

SEQ ID NO: 7231 - RNA, 20 nt, Artificial Sequence
  SAMD9 targeting guide sequence portion
caaaggaaagguaaccaucc

SEQ ID NO: 7232 - RNA, 20 nt, Artificial Sequence
  SAMD9 targeting guide sequence portion
cacaugucaggucuauggau

SEQ ID NO: 7233 - RNA, 20 nt, Artificial Sequence
  SAMD9 targeting guide sequence portion
caggucuauggaugguuacc

SEQ ID NO: 7234 - RNA, 20 nt, Artificial Sequence
  SAMD9 targeting guide sequence portion
caugucaggucuauggaugg

SEQ ID NO: 7235 - RNA, 20 nt, Artificial Sequence
  SAMD9 targeting guide sequence portion
cuauggaugguuaccuuucc

SEQ ID NO: 7236 - RNA, 20 nt, Artificial Sequence
  SAMD9 targeting guide sequence portion
gaaagguaaccauccauaga

SEQ ID NO: 7237 - RNA, 20 nt, Artificial Sequence
  SAMD9 targeting guide sequence portion
gaugguuaccuuuccuuugu

SEQ ID NO: 7238 - RNA, 20 nt, Artificial Sequence
  SAMD9 targeting guide sequence portion
gauuauacaaaggaaaggua

SEQ ID NO: 7239 - RNA, 20 nt, Artificial Sequence
  SAMD9 targeting guide sequence portion
ggaaagguaaccauccauag

SEQ ID NO: 7240 - RNA, 20 nt, Artificial Sequence
  SAMD9 targeting guide sequence portion
ggaugguuaccuuuccuuug

SEQ ID NO: 7241 - RNA, 20 nt, Artificial Sequence
  SAMD9 targeting guide sequence portion
gguaaccauccauagaccug

SEQ ID NO: 7242 - RNA, 20 nt, Artificial Sequence
  SAMD9 targeting guide sequence portion
ggucuauggaugguuaccuu

SEQ ID NO: 7243 - RNA, 20 nt, Artificial Sequence
  SAMD9 targeting guide sequence portion
gguuaccuuuccuuuguaua

SEQ ID NO: 7244 - RNA, 20 nt, Artificial Sequence
  SAMD9 targeting guide sequence portion
guaaccauccauagaccuga

SEQ ID NO: 7245 - RNA, 20 nt, Artificial Sequence
  SAMD9 targeting guide sequence portion
gucaggucuauggaugguua

SEQ ID NO: 7246 - RNA, 20 nt, Artificial Sequence
  SAMD9 targeting guide sequence portion
gucuauggaugguuaccuuu

SEQ ID NO: 7247 - RNA, 20 nt, Artificial Sequence
  SAMD9 targeting guide sequence portion
guuaccuuuccuuuguauaa

SEQ ID NO: 7248 - RNA, 20 nt, Artificial Sequence
  SAMD9 targeting guide sequence portion
uaaaauagauuauacaaagg

SEQ ID NO: 7249 - RNA, 20 nt, Artificial Sequence
  SAMD9 targeting guide sequence portion
uaaccauccauagaccugac

SEQ ID NO: 7250 - RNA, 20 nt, Artificial Sequence
  SAMD9 targeting guide sequence portion
uacaaaggaaagguaaccau

SEQ ID NO: 7251 - RNA, 20 nt, Artificial Sequence
  SAMD9 targeting guide sequence portion
uaccuuuccuuuguauaauc

SEQ ID NO: 7252 - RNA, 20 nt, Artificial Sequence
  SAMD9 targeting guide sequence portion
uagauuauacaaaggaaagg

SEQ ID NO: 7253 - RNA, 20 nt, Artificial Sequence
  SAMD9 targeting guide sequence portion
uauacaaaggaaagguaacc

SEQ ID NO: 7254 - RNA, 20 nt, Artificial Sequence
  SAMD9 targeting guide sequence portion
uauggaugguuaccuuuccu

SEQ ID NO: 7255 - RNA, 20 nt, Artificial Sequence
  SAMD9 targeting guide sequence portion
ucaggucuauggaugguuac

SEQ ID NO: 7256 - RNA, 20 nt, Artificial Sequence
  SAMD9 targeting guide sequence portion
ucuauggaugguuaccuuuc

SEQ ID NO: 7257 - RNA, 20 nt, Artificial Sequence
  SAMD9 targeting guide sequence portion
uggaugguuaccuuuccuuu

SEQ ID NO: 7258 - RNA, 20 nt, Artificial Sequence
  SAMD9 targeting guide sequence portion
ugguuaccuuuccuuuguau

SEQ ID NO: 7259 - RNA, 20 nt, Artificial Sequence
  SAMD9 targeting guide sequence portion
ugucaggucuauggaugguu

SEQ ID NO: 7260 - RNA, 20 nt, Artificial Sequence
  SAMD9 targeting guide sequence portion
uuaccuuuccuuuguauaau

SEQ ID NO: 7261 - RNA, 20 nt, Artificial Sequence
  SAMD9 targeting guide sequence portion
uuauacaaaggaaagguaac

SEQ ID NO: 7262 - RNA, 21 nt, Artificial Sequence
  SAMD9 targeting guide sequence portion
aaaggaaagguaaccauccau

SEQ ID NO: 7263 - RNA, 21 nt, Artificial Sequence
  SAMD9 targeting guide sequence portion
aaagguaaccauccauagacc

SEQ ID NO: 7264 - RNA, 21 nt, Artificial Sequence
  SAMD9 targeting guide sequence portion
aaggaaagguaaccauccaua

SEQ ID NO: 7265 - RNA, 21 nt, Artificial Sequence
  SAMD9 targeting guide sequence portion
aagguaaccauccauagaccu

SEQ ID NO: 7266 - RNA, 21 nt, Artificial Sequence
  SAMD9 targeting guide sequence portion
aauagauuauacaaaggaaag

SEQ ID NO: 7267 - RNA, 21 nt, Artificial Sequence
  SAMD9 targeting guide sequence portion
acaaaggaaagguaaccaucc

SEQ ID NO: 7268 - RNA, 21 nt, Artificial Sequence
  SAMD9 targeting guide sequence portion
acacaugucaggucuauggau

SEQ ID NO: 7269 - RNA, 21 nt, Artificial Sequence
  SAMD9 targeting guide sequence portion
acaugucaggucuauggaugg

SEQ ID NO: 7270 - RNA, 21 nt, Artificial Sequence
  SAMD9 targeting guide sequence portion
accuuuccuuuguauaaucua

SEQ ID NO: 7271 - RNA, 21 nt, Artificial Sequence
  SAMD9 targeting guide sequence portion
agauuauacaaaggaaaggua

SEQ ID NO: 7272 - RNA, 21 nt, Artificial Sequence
  SAMD9 targeting guide sequence portion
aggaaagguaaccauccauag

SEQ ID NO: 7273 - RNA, 21 nt, Artificial Sequence
  SAMD9 targeting guide sequence portion
agguaaccauccauagaccug

SEQ ID NO: 7274 - RNA, 21 nt, Artificial Sequence
  SAMD9 targeting guide sequence portion
aggucuauggaugguuaccuu

SEQ ID NO: 7275 - RNA, 21 nt, Artificial Sequence
  SAMD9 targeting guide sequence portion
auacaaaggaaagguaaccau

SEQ ID NO: 7276 - RNA, 21 nt, Artificial Sequence
  SAMD9 targeting guide sequence portion
auagauuauacaaaggaaagg

SEQ ID NO: 7277 - RNA, 21 nt, Artificial Sequence
  SAMD9 targeting guide sequence portion
auggaugguuaccuuuccuuu

SEQ ID NO: 7278 - RNA, 21 nt, Artificial Sequence
  SAMD9 targeting guide sequence portion
augguuaccuuuccuuuguau

SEQ ID NO: 7279 - RNA, 21 nt, Artificial Sequence
  SAMD9 targeting guide sequence portion
augucaggucuauggaugguu

SEQ ID NO: 7280 - RNA, 21 nt, Artificial Sequence
  SAMD9 targeting guide sequence portion
auuauacaaaggaaagguaac

SEQ ID NO: 7281 - RNA, 21 nt, Artificial Sequence
  SAMD9 targeting guide sequence portion
caaaggaaagguaaccaucca

SEQ ID NO: 7282 - RNA, 21 nt, Artificial Sequence
  SAMD9 targeting guide sequence portion
cacaugucaggucuauggaug

SEQ ID NO: 7283 - RNA, 21 nt, Artificial Sequence
  SAMD9 targeting guide sequence portion
caggucuauggaugguuaccu

SEQ ID NO: 7284 - RNA, 21 nt, Artificial Sequence
  SAMD9 targeting guide sequence portion
caugucaggucuauggauggu

SEQ ID NO: 7285 - RNA, 21 nt, Artificial Sequence
  SAMD9 targeting guide sequence portion
cuauggaugguuaccuuuccu

SEQ ID NO: 7286 - RNA, 21 nt, Artificial Sequence
  SAMD9 targeting guide sequence portion
gaaagguaaccauccauagac

SEQ ID NO: 7287 - RNA, 21 nt, Artificial Sequence
  SAMD9 targeting guide sequence portion
gaugguuaccuuuccuuugua

SEQ ID NO: 7288 - RNA, 21 nt, Artificial Sequence
  SAMD9 targeting guide sequence portion
gauuauacaaaggaaagguaa

SEQ ID NO: 7289 - RNA, 21 nt, Artificial Sequence
  SAMD9 targeting guide sequence portion
ggaaagguaaccauccauaga

SEQ ID NO: 7290 - RNA, 21 nt, Artificial Sequence
  SAMD9 targeting guide sequence portion
ggaugguuaccuuuccuuugu

SEQ ID NO: 7291 - RNA, 21 nt, Artificial Sequence
  SAMD9 targeting guide sequence portion
gguaaccauccauagaccuga

SEQ ID NO: 7292 - RNA, 21 nt, Artificial Sequence
  SAMD9 targeting guide sequence portion
ggucuauggaugguuaccuuu

SEQ ID NO: 7293 - RNA, 21 nt, Artificial Sequence
  SAMD9 targeting guide sequence portion
gguuaccuuuccuuuguauaa

SEQ ID NO: 7294 - RNA, 21 nt, Artificial Sequence
  SAMD9 targeting guide sequence portion
guaaccauccauagaccugac

SEQ ID NO: 7295 - RNA, 21 nt, Artificial Sequence
  SAMD9 targeting guide sequence portion
gucaggucuauggaugguuac

SEQ ID NO: 7296 - RNA, 21 nt, Artificial Sequence
  SAMD9 targeting guide sequence portion
gucuauggaugguuaccuuuc

SEQ ID NO: 7297 - RNA, 21 nt, Artificial Sequence
  SAMD9 targeting guide sequence portion
guuaccuuuccuuuguauaau

SEQ ID NO: 7298 - RNA, 21 nt, Artificial Sequence
  SAMD9 targeting guide sequence portion
uaaccauccauagaccugaca

SEQ ID NO: 7299 - RNA, 21 nt, Artificial Sequence
  SAMD9 targeting guide sequence portion
uacaaaggaaagguaaccauc

SEQ ID NO: 7300 - RNA, 21 nt, Artificial Sequence
  SAMD9 targeting guide sequence portion
uacacaugucaggucuaugga

SEQ ID NO: 7301 - RNA, 21 nt, Artificial Sequence
  SAMD9 targeting guide sequence portion
uaccuuuccuuuguauaaucu

SEQ ID NO: 7302 - RNA, 21 nt, Artificial Sequence
  SAMD9 targeting guide sequence portion
uagauuauacaaaggaaaggu

SEQ ID NO: 7303 - RNA, 21 nt, Artificial Sequence
  SAMD9 targeting guide sequence portion
uauacaaaggaaagguaacca

SEQ ID NO: 7304 - RNA, 21 nt, Artificial Sequence
  SAMD9 targeting guide sequence portion
uauggaugguuaccuuuccuu

SEQ ID NO: 7305 - RNA, 21 nt, Artificial Sequence
  SAMD9 targeting guide sequence portion
ucaggucuauggaugguuacc

SEQ ID NO: 7306 - RNA, 21 nt, Artificial Sequence
  SAMD9 targeting guide sequence portion
ucuauggaugguuaccuuucc

SEQ ID NO: 7307 - RNA, 21 nt, Artificial Sequence
  SAMD9 targeting guide sequence portion
uggaugguuaccuuuccuuug

SEQ ID NO: 7308 - RNA, 21 nt, Artificial Sequence
  SAMD9 targeting guide sequence portion
ugguuaccuuuccuuuguaua

SEQ ID NO: 7309 - RNA, 21 nt, Artificial Sequence
  SAMD9 targeting guide sequence portion
ugucaggucuauggaugguua

SEQ ID NO: 7310 - RNA, 21 nt, Artificial Sequence
  SAMD9 targeting guide sequence portion
uuaccuuuccuuuguauaauc

SEQ ID NO: 7311 - RNA, 21 nt, Artificial Sequence
  SAMD9 targeting guide sequence portion
uuauacaaaggaaagguaacc

SEQ ID NO: 7312 - RNA, 22 nt, Artificial Sequence
  SAMD9 targeting guide sequence portion
aaaggaaagguaaccauccaua

SEQ ID NO: 7313 - RNA, 22 nt, Artificial Sequence
  SAMD9 targeting guide sequence portion
aaagguaaccauccauagaccu

SEQ ID NO: 7314 - RNA, 22 nt, Artificial Sequence
  SAMD9 targeting guide sequence portion
aaauagauuauacaaaggaaag

SEQ ID NO: 7315 - RNA, 22 nt, Artificial Sequence
  SAMD9 targeting guide sequence portion
aaggaaagguaaccauccauag

SEQ ID NO: 7316 - RNA, 22 nt, Artificial Sequence
  SAMD9 targeting guide sequence portion
aagguaaccauccauagaccug

SEQ ID NO: 7317 - RNA, 22 nt, Artificial Sequence
  SAMD9 targeting guide sequence portion
aauagauuauacaaaggaaagg

SEQ ID NO: 7318 - RNA, 22 nt, Artificial Sequence
  SAMD9 targeting guide sequence portion
acaaaggaaagguaaccaucca

SEQ ID NO: 7319 - RNA, 22 nt, Artificial Sequence
  SAMD9 targeting guide sequence portion
acacaugucaggucuauggaug

SEQ ID NO: 7320 - RNA, 22 nt, Artificial Sequence
  SAMD9 targeting guide sequence portion
acaugucaggucuauggauggu

SEQ ID NO: 7321 - RNA, 22 nt, Artificial Sequence
  SAMD9 targeting guide sequence portion
accuuuccuuuguauaaucuau

SEQ ID NO: 7322 - RNA, 22 nt, Artificial Sequence
  SAMD9 targeting guide sequence portion
agauuauacaaaggaaagguaa

SEQ ID NO: 7323 - RNA, 22 nt, Artificial Sequence
  SAMD9 targeting guide sequence portion
aggaaagguaaccauccauaga

SEQ ID NO: 7324 - RNA, 22 nt, Artificial Sequence
  SAMD9 targeting guide sequence portion
agguaaccauccauagaccuga

SEQ ID NO: 7325 - RNA, 22 nt, Artificial Sequence
  SAMD9 targeting guide sequence portion
aggucuauggaugguuaccuuu

SEQ ID NO: 7326 - RNA, 22 nt, Artificial Sequence
  SAMD9 targeting guide sequence portion
auacaaaggaaagguaaccauc

SEQ ID NO: 7327 - RNA, 22 nt, Artificial Sequence
  SAMD9 targeting guide sequence portion
auacacaugucaggucuaugga

SEQ ID NO: 7328 - RNA, 22 nt, Artificial Sequence
  SAMD9 targeting guide sequence portion
auagauuauacaaaggaaaggu

SEQ ID NO: 7329 - RNA, 22 nt, Artificial Sequence
  SAMD9 targeting guide sequence portion
auggaugguuaccuuuccuuug

SEQ ID NO: 7330 - RNA, 22 nt, Artificial Sequence
  SAMD9 targeting guide sequence portion
augguuaccuuuccuuuguaua

SEQ ID NO: 7331 - RNA, 22 nt, Artificial Sequence
  SAMD9 targeting guide sequence portion
augucaggucuauggaugguua

SEQ ID NO: 7332 - RNA, 22 nt, Artificial Sequence
  SAMD9 targeting guide sequence portion
auuauacaaaggaaagguaacc

SEQ ID NO: 7333 - RNA, 22 nt, Artificial Sequence
  SAMD9 targeting guide sequence portion
caaaggaaagguaaccauccau

SEQ ID NO: 7334 - RNA, 22 nt, Artificial Sequence
  SAMD9 targeting guide sequence portion
cacaugucaggucuauggaugg

SEQ ID NO: 7335 - RNA, 22 nt, Artificial Sequence
  SAMD9 targeting guide sequence portion
caggucuauggaugguuaccuu

SEQ ID NO: 7336 - RNA, 22 nt, Artificial Sequence
  SAMD9 targeting guide sequence portion
caugucaggucuauggaugguu

SEQ ID NO: 7337 - RNA, 22 nt, Artificial Sequence
  SAMD9 targeting guide sequence portion
cuauggaugguuaccuuuccuu

SEQ ID NO: 7338 - RNA, 22 nt, Artificial Sequence
  SAMD9 targeting guide sequence portion
gaaagguaaccauccauagacc

SEQ ID NO: 7339 - RNA, 22 nt, Artificial Sequence
  SAMD9 targeting guide sequence portion
gauaaaauagauuauacaaagg

SEQ ID NO: 7340 - RNA, 22 nt, Artificial Sequence
  SAMD9 targeting guide sequence portion
gaugguuaccuuuccuuuguau

SEQ ID NO: 7341 - RNA, 22 nt, Artificial Sequence
  SAMD9 targeting guide sequence portion
gauuauacaaaggaaagguaac

SEQ ID NO: 7342 - RNA, 22 nt, Artificial Sequence
  SAMD9 targeting guide sequence portion
ggaaagguaaccauccauagac

SEQ ID NO: 7343 - RNA, 22 nt, Artificial Sequence
  SAMD9 targeting guide sequence portion
ggaugguuaccuuuccuuugua

SEQ ID NO: 7344 - RNA, 22 nt, Artificial Sequence
  SAMD9 targeting guide sequence portion
gguaaccauccauagaccugac

SEQ ID NO: 7345 - RNA, 22 nt, Artificial Sequence
  SAMD9 targeting guide sequence portion
ggucuauggaugguuaccuuuc

SEQ ID NO: 7346 - RNA, 22 nt, Artificial Sequence
  SAMD9 targeting guide sequence portion
gguuaccuuuccuuuguauaau

SEQ ID NO: 7347 - RNA, 22 nt, Artificial Sequence
  SAMD9 targeting guide sequence portion
guaaccauccauagaccugaca

SEQ ID NO: 7348 - RNA, 22 nt, Artificial Sequence
  SAMD9 targeting guide sequence portion
gucaggucuauggaugguuacc

SEQ ID NO: 7349 - RNA, 22 nt, Artificial Sequence
  SAMD9 targeting guide sequence portion
gucuauggaugguuaccuuucc

SEQ ID NO: 7350 - RNA, 22 nt, Artificial Sequence
  SAMD9 targeting guide sequence portion
guuaccuuuccuuuguauaauc

SEQ ID NO: 7351 - RNA, 22 nt, Artificial Sequence
  SAMD9 targeting guide sequence portion
uaaccauccauagaccugacau

SEQ ID NO: 7352 - RNA, 22 nt, Artificial Sequence
  SAMD9 targeting guide sequence portion
uacaaaggaaagguaaccaucc

SEQ ID NO: 7353 - RNA, 22 nt, Artificial Sequence
  SAMD9 targeting guide sequence portion
uacacaugucaggucuauggau

SEQ ID NO: 7354 - RNA, 22 nt, Artificial Sequence
  SAMD9 targeting guide sequence portion
uaccuuuccuuuguauaaucua

SEQ ID NO: 7355 - RNA, 22 nt, Artificial Sequence
  SAMD9 targeting guide sequence portion
uagauuauacaaaggaaaggua

SEQ ID NO: 7356 - RNA, 22 nt, Artificial Sequence
  SAMD9 targeting guide sequence portion
uauacaaaggaaagguaaccau

SEQ ID NO: 7357 - RNA, 22 nt, Artificial Sequence
  SAMD9 targeting guide sequence portion
uauggaugguuaccuuuccuuu

SEQ ID NO: 7358 - RNA, 22 nt, Artificial Sequence
  SAMD9 targeting guide sequence portion
ucaggucuauggaugguuaccu

SEQ ID NO: 7359 - RNA, 22 nt, Artificial Sequence
  SAMD9 targeting guide sequence portion
ucuauggaugguuaccuuuccu

SEQ ID NO: 7360 - RNA, 22 nt, Artificial Sequence
  SAMD9 targeting guide sequence portion
uggaugguuaccuuuccuuugu

SEQ ID NO: 7361 - RNA, 22 nt, Artificial Sequence
  SAMD9 targeting guide sequence portion
ugguuaccuuuccuuuguauaa

SEQ ID NO: 7362 - RNA, 22 nt, Artificial Sequence
  SAMD9 targeting guide sequence portion
ugucaggucuauggaugguuac

SEQ ID NO: 7363 - RNA, 22 nt, Artificial Sequence
  SAMD9 targeting guide sequence portion
uuaccuuuccuuuguauaaucu

SEQ ID NO: 7364 - RNA, 22 nt, Artificial Sequence
  SAMD9 targeting guide sequence portion
uuauacaaaggaaagguaacca

SEQ ID NO: 7365 - RNA, 20 nt, Artificial Sequence
  SAMD9 targeting guide sequence portion
aaaaggaacauagagaaacu

SEQ ID NO: 7366 - RNA, 20 nt, Artificial Sequence
  SAMD9 targeting guide sequence portion
aaacugugucucaaaaggaa

SEQ ID NO: 7367 - RNA, 20 nt, Artificial Sequence
  SAMD9 targeting guide sequence portion
aaaggaacauagagaaacuu

SEQ ID NO: 7368 - RNA, 20 nt, Artificial Sequence
  SAMD9 targeting guide sequence portion
aacauagagaaacuucaaag

SEQ ID NO: 7369 - RNA, 20 nt, Artificial Sequence
  SAMD9 targeting guide sequence portion
aacugugucucaaaaggaac

SEQ ID NO: 7370 - RNA, 20 nt, Artificial Sequence
  SAMD9 targeting guide sequence portion
aaggaacauagagaaacuuc

SEQ ID NO: 7371 - RNA, 20 nt, Artificial Sequence
  SAMD9 targeting guide sequence portion
aaguuucucuauguuccuuu

SEQ ID NO: 7372 - RNA, 20 nt, Artificial Sequence
  SAMD9 targeting guide sequence portion
acauagagaaacuucaaagc

SEQ ID NO: 7373 - RNA, 20 nt, Artificial Sequence
  SAMD9 targeting guide sequence portion
accaaacugugucucaaaag

SEQ ID NO: 7374 - RNA, 20 nt, Artificial Sequence
  SAMD9 targeting guide sequence portion
acugugucucaaaaggaaca

SEQ ID NO: 7375 - RNA, 20 nt, Artificial Sequence
  SAMD9 targeting guide sequence portion
aggaacauagagaaacuuca

SEQ ID NO: 7376 - RNA, 20 nt, Artificial Sequence
  SAMD9 targeting guide sequence portion
aguuucucuauguuccuuuu

SEQ ID NO: 7377 - RNA, 20 nt, Artificial Sequence
  SAMD9 targeting guide sequence portion
auagagaaacuucaaagcaa

SEQ ID NO: 7378 - RNA, 20 nt, Artificial Sequence
  SAMD9 targeting guide sequence portion
auguuccuuuugagacacag

SEQ ID NO: 7379 - RNA, 20 nt, Artificial Sequence
  SAMD9 targeting guide sequence portion
caaaaggaacauagagaaac

SEQ ID NO: 7380 - RNA, 20 nt, Artificial Sequence
  SAMD9 targeting guide sequence portion
caaacugugucucaaaagga

SEQ ID NO: 7381 - RNA, 20 nt, Artificial Sequence
  SAMD9 targeting guide sequence portion
cauagagaaacuucaaagca

SEQ ID NO: 7382 - RNA, 20 nt, Artificial Sequence
  SAMD9 targeting guide sequence portion
ccaaacugugucucaaaagg

SEQ ID NO: 7383 - RNA, 20 nt, Artificial Sequence
  SAMD9 targeting guide sequence portion
cuauguuccuuuugagacac

SEQ ID NO: 7384 - RNA, 20 nt, Artificial Sequence
  SAMD9 targeting guide sequence portion
cucaaaaggaacauagagaa

SEQ ID NO: 7385 - RNA, 20 nt, Artificial Sequence
  SAMD9 targeting guide sequence portion
cucuauguuccuuuugagac

SEQ ID NO: 7386 - RNA, 20 nt, Artificial Sequence
  SAMD9 targeting guide sequence portion
cugugucucaaaaggaacau

SEQ ID NO: 7387 - RNA, 20 nt, Artificial Sequence
  SAMD9 targeting guide sequence portion
cuuugaaguuucucuauguu

SEQ ID NO: 7388 - RNA, 20 nt, Artificial Sequence
  SAMD9 targeting guide sequence portion
gaacauagagaaacuucaaa

SEQ ID NO: 7389 - RNA, 20 nt, Artificial Sequence
  SAMD9 targeting guide sequence portion
gaaguuucucuauguuccuu

SEQ ID NO: 7390 - RNA, 20 nt, Artificial Sequence
  SAMD9 targeting guide sequence portion
gaccaaacugugucucaaaa

SEQ ID NO: 7391 - RNA, 20 nt, Artificial Sequence
  SAMD9 targeting guide sequence portion
gcuuugaaguuucucuaugu

SEQ ID NO: 7392 - RNA, 20 nt, Artificial Sequence
  SAMD9 targeting guide sequence portion
ggaacauagagaaacuucaa

SEQ ID NO: 7393 - RNA, 20 nt, Artificial Sequence
  SAMD9 targeting guide sequence portion
gucucaaaaggaacauagag

SEQ ID NO: 7394 - RNA, 20 nt, Artificial Sequence
  SAMD9 targeting guide sequence portion
gugucucaaaaggaacauag

SEQ ID NO: 7395 - RNA, 20 nt, Artificial Sequence
  SAMD9 targeting guide sequence portion
guuucucuauguuccuuuug

SEQ ID NO: 7396 - RNA, 20 nt, Artificial Sequence
  SAMD9 targeting guide sequence portion
guuuuugcuuugaaguuucu

SEQ ID NO: 7397 - RNA, 20 nt, Artificial Sequence
  SAMD9 targeting guide sequence portion
uauguuccuuuugagacaca

SEQ ID NO: 7398 - RNA, 20 nt, Artificial Sequence
  SAMD9 targeting guide sequence portion
ucaaaaggaacauagagaaa

SEQ ID NO: 7399 - RNA, 20 nt, Artificial Sequence
  SAMD9 targeting guide sequence portion
ucuauguuccuuuugagaca

SEQ ID NO: 7400 - RNA, 20 nt, Artificial Sequence
  SAMD9 targeting guide sequence portion
ucucaaaaggaacauagaga

SEQ ID NO: 7401 - RNA, 20 nt, Artificial Sequence
  SAMD9 targeting guide sequence portion
ucucuauguuccuuuugaga

SEQ ID NO: 7402 - RNA, 20 nt, Artificial Sequence
  SAMD9 targeting guide sequence portion
ugaaguuucucuauguuccu

SEQ ID NO: 7403 - RNA, 20 nt, Artificial Sequence
  SAMD9 targeting guide sequence portion
ugcuuugaaguuucucuaug

SEQ ID NO: 7404 - RNA, 20 nt, Artificial Sequence
  SAMD9 targeting guide sequence portion
ugucucaaaaggaacauaga

SEQ ID NO: 7405 - RNA, 20 nt, Artificial Sequence
  SAMD9 targeting guide sequence portion
ugugucucaaaaggaacaua

SEQ ID NO: 7406 - RNA, 20 nt, Artificial Sequence
  SAMD9 targeting guide sequence portion
uguuccuuuugagacacagu

SEQ ID NO: 7407 - RNA, 20 nt, Artificial Sequence
  SAMD9 targeting guide sequence portion
uguuuuugcuuugaaguuuc

SEQ ID NO: 7408 - RNA, 20 nt, Artificial Sequence
  SAMD9 targeting guide sequence portion
uucucuauguuccuuuugag

SEQ ID NO: 7409 - RNA, 20 nt, Artificial Sequence
  SAMD9 targeting guide sequence portion
uugaaguuucucuauguucc

SEQ ID NO: 7410 - RNA, 20 nt, Artificial Sequence
  SAMD9 targeting guide sequence portion
uugcuuugaaguuucucuau

SEQ ID NO: 7411 - RNA, 20 nt, Artificial Sequence
  SAMD9 targeting guide sequence portion
uuguuuuugcuuugaaguuu

SEQ ID NO: 7412 - RNA, 20 nt, Artificial Sequence
  SAMD9 targeting guide sequence portion
uuucucuauguuccuuuuga

SEQ ID NO: 7413 - RNA, 20 nt, Artificial Sequence
  SAMD9 targeting guide sequence portion
uuugaaguuucucuauguuc

SEQ ID NO: 7414 - RNA, 20 nt, Artificial Sequence
  SAMD9 targeting guide sequence portion
uuugcuuugaaguuucucua

SEQ ID NO: 7415 - RNA, 20 nt, Artificial Sequence
  SAMD9 targeting guide sequence portion
uuuugcuuugaaguuucucu

SEQ ID NO: 7416 - RNA, 20 nt, Artificial Sequence
  SAMD9 targeting guide sequence portion
uuuuugcuuugaaguuucuc

SEQ ID NO: 7417 - RNA, 21 nt, Artificial Sequence
  SAMD9 targeting guide sequence portion
aaaaggaacauagagaaacuu

SEQ ID NO: 7418 - RNA, 21 nt, Artificial Sequence
  SAMD9 targeting guide sequence portion
aaacugugucucaaaaggaac

SEQ ID NO: 7419 - RNA, 21 nt, Artificial Sequence
  SAMD9 targeting guide sequence portion
aaaggaacauagagaaacuuc

SEQ ID NO: 7420 - RNA, 21 nt, Artificial Sequence
  SAMD9 targeting guide sequence portion
aacauagagaaacuucaaagc

SEQ ID NO: 7421 - RNA, 21 nt, Artificial Sequence
  SAMD9 targeting guide sequence portion
aacugugucucaaaaggaaca

SEQ ID NO: 7422 - RNA, 21 nt, Artificial Sequence
  SAMD9 targeting guide sequence portion
aaggaacauagagaaacuuca

SEQ ID NO: 7423 - RNA, 21 nt, Artificial Sequence
  SAMD9 targeting guide sequence portion
aaguuucucuauguuccuuuu

SEQ ID NO: 7424 - RNA, 21 nt, Artificial Sequence
  SAMD9 targeting guide sequence portion
acauagagaaacuucaaagca

SEQ ID NO: 7425 - RNA, 21 nt, Artificial Sequence
  SAMD9 targeting guide sequence portion
accaaacugugucucaaaagg

SEQ ID NO: 7426 - RNA, 21 nt, Artificial Sequence
  SAMD9 targeting guide sequence portion
acugugucucaaaaggaacau

SEQ ID NO: 7427 - RNA, 21 nt, Artificial Sequence
  SAMD9 targeting guide sequence portion
agaccaaacugugucucaaaa

SEQ ID NO: 7428 - RNA, 21 nt, Artificial Sequence
  SAMD9 targeting guide sequence portion
aggaacauagagaaacuucaa

SEQ ID NO: 7429 - RNA, 21 nt, Artificial Sequence
  SAMD9 targeting guide sequence portion
aguuucucuauguuccuuuug

SEQ ID NO: 7430 - RNA, 21 nt, Artificial Sequence
  SAMD9 targeting guide sequence portion
auagagaaacuucaaagcaaa

SEQ ID NO: 7431 - RNA, 21 nt, Artificial Sequence
  SAMD9 targeting guide sequence portion
auguuccuuuugagacacagu

SEQ ID NO: 7432 - RNA, 21 nt, Artificial Sequence
  SAMD9 targeting guide sequence portion
caaaaggaacauagagaaacu

SEQ ID NO: 7433 - RNA, 21 nt, Artificial Sequence
  SAMD9 targeting guide sequence portion
caaacugugucucaaaaggaa

SEQ ID NO: 7434 - RNA, 21 nt, Artificial Sequence
  SAMD9 targeting guide sequence portion
cauagagaaacuucaaagcaa

SEQ ID NO: 7435 - RNA, 21 nt, Artificial Sequence
  SAMD9 targeting guide sequence portion
ccaaacugugucucaaaagga

SEQ ID NO: 7436 - RNA, 21 nt, Artificial Sequence
  SAMD9 targeting guide sequence portion
cuauguuccuuuugagacaca

SEQ ID NO: 7437 - RNA, 21 nt, Artificial Sequence
  SAMD9 targeting guide sequence portion
cucaaaaggaacauagagaaa

SEQ ID NO: 7438 - RNA, 21 nt, Artificial Sequence
  SAMD9 targeting guide sequence portion
cucuauguuccuuuugagaca

SEQ ID NO: 7439 - RNA, 21 nt, Artificial Sequence
  SAMD9 targeting guide sequence portion
cugugucucaaaaggaacaua

SEQ ID NO: 7440 - RNA, 21 nt, Artificial Sequence
  SAMD9 targeting guide sequence portion
cuuugaaguuucucuauguuc

SEQ ID NO: 7441 - RNA, 21 nt, Artificial Sequence
  SAMD9 targeting guide sequence portion
gaacauagagaaacuucaaag

SEQ ID NO: 7442 - RNA, 21 nt, Artificial Sequence
  SAMD9 targeting guide sequence portion
gaaguuucucuauguuccuuu

SEQ ID NO: 7443 - RNA, 21 nt, Artificial Sequence
  SAMD9 targeting guide sequence portion
gaccaaacugugucucaaaag

SEQ ID NO: 7444 - RNA, 21 nt, Artificial Sequence
  SAMD9 targeting guide sequence portion
gcuuugaaguuucucuauguu

SEQ ID NO: 7445 - RNA, 21 nt, Artificial Sequence
  SAMD9 targeting guide sequence portion
ggaacauagagaaacuucaaa

SEQ ID NO: 7446 - RNA, 21 nt, Artificial Sequence
  SAMD9 targeting guide sequence portion
gucucaaaaggaacauagaga

SEQ ID NO: 7447 - RNA, 21 nt, Artificial Sequence
  SAMD9 targeting guide sequence portion
gugucucaaaaggaacauaga

SEQ ID NO: 7448 - RNA, 21 nt, Artificial Sequence
  SAMD9 targeting guide sequence portion
guuucucuauguuccuuuuga

SEQ ID NO: 7449 - RNA, 21 nt, Artificial Sequence
  SAMD9 targeting guide sequence portion
guuuuugcuuugaaguuucuc

SEQ ID NO: 7450 - RNA, 21 nt, Artificial Sequence
  SAMD9 targeting guide sequence portion
uauguuccuuuugagacacag

SEQ ID NO: 7451 - RNA, 21 nt, Artificial Sequence
  SAMD9 targeting guide sequence portion
ucaaaaggaacauagagaaac

SEQ ID NO: 7452 - RNA, 21 nt, Artificial Sequence
  SAMD9 targeting guide sequence portion
ucuauguuccuuuugagacac

SEQ ID NO: 7453 - RNA, 21 nt, Artificial Sequence
  SAMD9 targeting guide sequence portion
ucucaaaaggaacauagagaa

SEQ ID NO: 7454 - RNA, 21 nt, Artificial Sequence
  SAMD9 targeting guide sequence portion
ucucuauguuccuuuugagac

SEQ ID NO: 7455 - RNA, 21 nt, Artificial Sequence
  SAMD9 targeting guide sequence portion
ugaaguuucucuauguuccuu

SEQ ID NO: 7456 - RNA, 21 nt, Artificial Sequence
  SAMD9 targeting guide sequence portion
ugcuuugaaguuucucuaugu

SEQ ID NO: 7457 - RNA, 21 nt, Artificial Sequence
  SAMD9 targeting guide sequence portion
ugucucaaaaggaacauagag

SEQ ID NO: 7458 - RNA, 21 nt, Artificial Sequence
  SAMD9 targeting guide sequence portion
ugugucucaaaaggaacauag

SEQ ID NO: 7459 - RNA, 21 nt, Artificial Sequence
  SAMD9 targeting guide sequence portion
uguuccuuuugagacacaguu

SEQ ID NO: 7460 - RNA, 21 nt, Artificial Sequence
  SAMD9 targeting guide sequence portion
uguuuuugcuuugaaguuucu

SEQ ID NO: 7461 - RNA, 21 nt, Artificial Sequence
  SAMD9 targeting guide sequence portion
uucucuauguuccuuuugaga

SEQ ID NO: 7462 - RNA, 21 nt, Artificial Sequence
  SAMD9 targeting guide sequence portion
uugaaguuucucuauguuccu

SEQ ID NO: 7463 - RNA, 21 nt, Artificial Sequence
  SAMD9 targeting guide sequence portion
uugcuuugaaguuucucuaug

SEQ ID NO: 7464 - RNA, 21 nt, Artificial Sequence
  SAMD9 targeting guide sequence portion
uuguuuuugcuuugaaguuuc

SEQ ID NO: 7465 - RNA, 21 nt, Artificial Sequence
  SAMD9 targeting guide sequence portion
uuucucuauguuccuuuugag

SEQ ID NO: 7466 - RNA, 21 nt, Artificial Sequence
  SAMD9 targeting guide sequence portion
uuugaaguuucucuauguucc

SEQ ID NO: 7467 - RNA, 21 nt, Artificial Sequence
  SAMD9 targeting guide sequence portion
uuugcuuugaaguuucucuau

SEQ ID NO: 7468 - RNA, 21 nt, Artificial Sequence
  SAMD9 targeting guide sequence portion
uuuguuuuugcuuugaaguuu

SEQ ID NO: 7469 - RNA, 21 nt, Artificial Sequence
  SAMD9 targeting guide sequence portion
uuuugcuuugaaguuucucua

SEQ ID NO: 7470 - RNA, 21 nt, Artificial Sequence
  SAMD9 targeting guide sequence portion
uuuuugcuuugaaguuucucu

SEQ ID NO: 7471 - RNA, 22 nt, Artificial Sequence
  SAMD9 targeting guide sequence portion
aaaaggaacauagagaaacuuc

SEQ ID NO: 7472 - RNA, 22 nt, Artificial Sequence
  SAMD9 targeting guide sequence portion
aaacugugucucaaaaggaaca

SEQ ID NO: 7473 - RNA, 22 nt, Artificial Sequence
  SAMD9 targeting guide sequence portion
aaaggaacauagagaaacuuca

SEQ ID NO: 7474 - RNA, 22 nt, Artificial Sequence
  SAMD9 targeting guide sequence portion
aacauagagaaacuucaaagca

SEQ ID NO: 7475 - RNA, 22 nt, Artificial Sequence
  SAMD9 targeting guide sequence portion
aacugugucucaaaaggaacau

SEQ ID NO: 7476 - RNA, 22 nt, Artificial Sequence
  SAMD9 targeting guide sequence portion
aagaccaaacugugucucaaaa

SEQ ID NO: 7477 - RNA, 22 nt, Artificial Sequence
  SAMD9 targeting guide sequence portion
aaggaacauagagaaacuucaa

SEQ ID NO: 7478 - RNA, 22 nt, Artificial Sequence
  SAMD9 targeting guide sequence portion
aaguuucucuauguuccuuuug

SEQ ID NO: 7479 - RNA, 22 nt, Artificial Sequence
  SAMD9 targeting guide sequence portion
acauagagaaacuucaaagcaa

SEQ ID NO: 7480 - RNA, 22 nt, Artificial Sequence
  SAMD9 targeting guide sequence portion
accaaacugugucucaaaagga

SEQ ID NO: 7481 - RNA, 22 nt, Artificial Sequence
  SAMD9 targeting guide sequence portion
acugugucucaaaaggaacaua

SEQ ID NO: 7482 - RNA, 22 nt, Artificial Sequence
  SAMD9 targeting guide sequence portion
agaccaaacugugucucaaaag

SEQ ID NO: 7483 - RNA, 22 nt, Artificial Sequence
  SAMD9 targeting guide sequence portion
aggaacauagagaaacuucaaa

SEQ ID NO: 7484 - RNA, 22 nt, Artificial Sequence
  SAMD9 targeting guide sequence portion
aguuucucuauguuccuuuuga

SEQ ID NO: 7485 - RNA, 22 nt, Artificial Sequence
  SAMD9 targeting guide sequence portion
auagagaaacuucaaagcaaaa

SEQ ID NO: 7486 - RNA, 22 nt, Artificial Sequence
  SAMD9 targeting guide sequence portion
auguuccuuuugagacacaguu

SEQ ID NO: 7487 - RNA, 22 nt, Artificial Sequence
  SAMD9 targeting guide sequence portion
caaaaggaacauagagaaacuu

SEQ ID NO: 7488 - RNA, 22 nt, Artificial Sequence
  SAMD9 targeting guide sequence portion
caaacugugucucaaaaggaac

SEQ ID NO: 7489 - RNA, 22 nt, Artificial Sequence
  SAMD9 targeting guide sequence portion
cauagagaaacuucaaagcaaa

SEQ ID NO: 7490 - RNA, 22 nt, Artificial Sequence
  SAMD9 targeting guide sequence portion
ccaaacugugucucaaaaggaa

SEQ ID NO: 7491 - RNA, 22 nt, Artificial Sequence
  SAMD9 targeting guide sequence portion
cuauguuccuuuugagacacag

SEQ ID NO: 7492 - RNA, 22 nt, Artificial Sequence
  SAMD9 targeting guide sequence portion
cucaaaaggaacauagagaaac

SEQ ID NO: 7493 - RNA, 22 nt, Artificial Sequence
  SAMD9 targeting guide sequence portion
cucuauguuccuuuugagacac

SEQ ID NO: 7494 - RNA, 22 nt, Artificial Sequence
  SAMD9 targeting guide sequence portion
cugugucucaaaaggaacauag

SEQ ID NO: 7495 - RNA, 22 nt, Artificial Sequence
  SAMD9 targeting guide sequence portion
cuuugaaguuucucuauguucc

SEQ ID NO: 7496 - RNA, 22 nt, Artificial Sequence
  SAMD9 targeting guide sequence portion
gaacauagagaaacuucaaagc

SEQ ID NO: 7497 - RNA, 22 nt, Artificial Sequence
  SAMD9 targeting guide sequence portion
gaaguuucucuauguuccuuuu

SEQ ID NO: 7498 - RNA, 22 nt, Artificial Sequence
  SAMD9 targeting guide sequence portion
gaccaaacugugucucaaaagg

SEQ ID NO: 7499 - RNA, 22 nt, Artificial Sequence
  SAMD9 targeting guide sequence portion
gcuuugaaguuucucuauguuc

SEQ ID NO: 7500 - RNA, 22 nt, Artificial Sequence
  SAMD9 targeting guide sequence portion
ggaacauagagaaacuucaaag

SEQ ID NO: 7501 - RNA, 22 nt, Artificial Sequence
  SAMD9 targeting guide sequence portion
gucucaaaaggaacauagagaa

SEQ ID NO: 7502 - RNA, 22 nt, Artificial Sequence
  SAMD9 targeting guide sequence portion
gugucucaaaaggaacauagag

SEQ ID NO: 7503 - RNA, 22 nt, Artificial Sequence
  SAMD9 targeting guide sequence portion
guuucucuauguuccuuuugag

SEQ ID NO: 7504 - RNA, 22 nt, Artificial Sequence
  SAMD9 targeting guide sequence portion
guuuuugcuuugaaguuucucu

SEQ ID NO: 7505 - RNA, 22 nt, Artificial Sequence
  SAMD9 targeting guide sequence portion
uauguuccuuuugagacacagu

SEQ ID NO: 7506 - RNA, 22 nt, Artificial Sequence
  SAMD9 targeting guide sequence portion
ucaaaaggaacauagagaaacu

SEQ ID NO: 7507 - RNA, 22 nt, Artificial Sequence
  SAMD9 targeting guide sequence portion
ucuauguuccuuuugagacaca

SEQ ID NO: 7508 - RNA, 22 nt, Artificial Sequence
  SAMD9 targeting guide sequence portion
ucucaaaaggaacauagagaaa

SEQ ID NO: 7509 - RNA, 22 nt, Artificial Sequence
  SAMD9 targeting guide sequence portion
ucucuauguuccuuuugagaca

SEQ ID NO: 7510 - RNA, 22 nt, Artificial Sequence
  SAMD9 targeting guide sequence portion
ugaaguuucucuauguuccuuu

SEQ ID NO: 7511 - RNA, 22 nt, Artificial Sequence
  SAMD9 targeting guide sequence portion
ugcuuugaaguuucucuauguu

SEQ ID NO: 7512 - RNA, 22 nt, Artificial Sequence
  SAMD9 targeting guide sequence portion
ugucucaaaaggaacauagaga

SEQ ID NO: 7513 - RNA, 22 nt, Artificial Sequence
  SAMD9 targeting guide sequence portion
ugugucucaaaaggaacauaga

SEQ ID NO: 7514 - RNA, 22 nt, Artificial Sequence
  SAMD9 targeting guide sequence portion
uguuccuuuugagacacaguuu

SEQ ID NO: 7515 - RNA, 22 nt, Artificial Sequence
  SAMD9 targeting guide sequence portion
uguuuuugcuuugaaguuucuc

SEQ ID NO: 7516 - RNA, 22 nt, Artificial Sequence
  SAMD9 targeting guide sequence portion
uucucuauguuccuuuugagac

SEQ ID NO: 7517 - RNA, 22 nt, Artificial Sequence
  SAMD9 targeting guide sequence portion
uugaaguuucucuauguuccuu

SEQ ID NO: 7518 - RNA, 22 nt, Artificial Sequence
  SAMD9 targeting guide sequence portion
uugcuuugaaguuucucuaugu

SEQ ID NO: 7519 - RNA, 22 nt, Artificial Sequence
  SAMD9 targeting guide sequence portion
uuguuuuugcuuugaaguuucu

SEQ ID NO: 7520 - RNA, 22 nt, Artificial Sequence
  SAMD9 targeting guide sequence portion
uuucucuauguuccuuuugaga

SEQ ID NO: 7521 - RNA, 22 nt, Artificial Sequence
  SAMD9 targeting guide sequence portion
uuugaaguuucucuauguuccu

SEQ ID NO: 7522 - RNA, 22 nt, Artificial Sequence
  SAMD9 targeting guide sequence portion
uuugcuuugaaguuucucuaug

SEQ ID NO: 7523 - RNA, 22 nt, Artificial Sequence
  SAMD9 targeting guide sequence portion
uuuguuuuugcuuugaaguuuc

SEQ ID NO: 7524 - RNA, 22 nt, Artificial Sequence
  SAMD9 targeting guide sequence portion
uuuugcuuugaaguuucucuau

SEQ ID NO: 7525 - RNA, 22 nt, Artificial Sequence
  SAMD9 targeting guide sequence portion
uuuuguuuuugcuuugaaguuu

SEQ ID NO: 7526 - RNA, 22 nt, Artificial Sequence
  SAMD9 targeting guide sequence portion
uuuuugcuuugaaguuucucua

SEQ ID NO: 7527 - RNA, 20 nt, Artificial Sequence
  SAMD9 targeting guide sequence portion
aacaagacgugaauggagcg

SEQ ID NO: 7528 - RNA, 20 nt, Artificial Sequence
  SAMD9 targeting guide sequence portion
aaccacuucaagacgcucca

SEQ ID NO: 7529 - RNA, 20 nt, Artificial Sequence
  SAMD9 targeting guide sequence portion
aagacgcuccauucacgucu

SEQ ID NO: 7530 - RNA, 20 nt, Artificial Sequence
  SAMD9 targeting guide sequence portion
aagacgugaauggagcgucu

SEQ ID NO: 7531 - RNA, 20 nt, Artificial Sequence
  SAMD9 targeting guide sequence portion
aauggagcgucuugaagugg

SEQ ID NO: 7532 - RNA, 20 nt, Artificial Sequence
  SAMD9 targeting guide sequence portion
acaagacgugaauggagcgu

SEQ ID NO: 7533 - RNA, 20 nt, Artificial Sequence
  SAMD9 targeting guide sequence portion
accacuucaagacgcuccau

SEQ ID NO: 7534 - RNA, 20 nt, Artificial Sequence
  SAMD9 targeting guide sequence portion
acgcuccauucacgucuugu

SEQ ID NO: 7535 - RNA, 20 nt, Artificial Sequence
  SAMD9 targeting guide sequence portion
acgugaauggagcgucuuga

SEQ ID NO: 7536 - RNA, 20 nt, Artificial Sequence
  SAMD9 targeting guide sequence portion
acugaacaagacgugaaugg

SEQ ID NO: 7537 - RNA, 20 nt, Artificial Sequence
  SAMD9 targeting guide sequence portion
acuucaagacgcuccauuca

SEQ ID NO: 7538 - RNA, 20 nt, Artificial Sequence
  SAMD9 targeting guide sequence portion
agacgcuccauucacgucuu

SEQ ID NO: 7539 - RNA, 20 nt, Artificial Sequence
  SAMD9 targeting guide sequence portion
agacgugaauggagcgucuu

SEQ ID NO: 7540 - RNA, 20 nt, Artificial Sequence
  SAMD9 targeting guide sequence portion
agcgucuugaagugguuaaa

SEQ ID NO: 7541 - RNA, 20 nt, Artificial Sequence
  SAMD9 targeting guide sequence portion
auggagcgucuugaaguggu

SEQ ID NO: 7542 - RNA, 20 nt, Artificial Sequence
  SAMD9 targeting guide sequence portion
caagacgcuccauucacguc

SEQ ID NO: 7543 - RNA, 20 nt, Artificial Sequence
  SAMD9 targeting guide sequence portion
caagacgugaauggagcguc

SEQ ID NO: 7544 - RNA, 20 nt, Artificial Sequence
  SAMD9 targeting guide sequence portion
cacuucaagacgcuccauuc

SEQ ID NO: 7545 - RNA, 20 nt, Artificial Sequence
  SAMD9 targeting guide sequence portion
ccacuucaagacgcuccauu

SEQ ID NO: 7546 - RNA, 20 nt, Artificial Sequence
  SAMD9 targeting guide sequence portion
cgcuccauucacgucuuguu

SEQ ID NO: 7547 - RNA, 20 nt, Artificial Sequence
  SAMD9 targeting guide sequence portion
cgucuugaagugguuaaaaa

SEQ ID NO: 7548 - RNA, 20 nt, Artificial Sequence
  SAMD9 targeting guide sequence portion
cgugaauggagcgucuugaa

SEQ ID NO: 7549 - RNA, 20 nt, Artificial Sequence
  SAMD9 targeting guide sequence portion
cugaacaagacgugaaugga

SEQ ID NO: 7550 - RNA, 20 nt, Artificial Sequence
  SAMD9 targeting guide sequence portion
cuucaagacgcuccauucac

SEQ ID NO: 7551 - RNA, 20 nt, Artificial Sequence
  SAMD9 targeting guide sequence portion
gaacaagacgugaauggagc

SEQ ID NO: 7552 - RNA, 20 nt, Artificial Sequence
  SAMD9 targeting guide sequence portion
gaauggagcgucuugaagug

SEQ ID NO: 7553 - RNA, 20 nt, Artificial Sequence
  SAMD9 targeting guide sequence portion
gacgcuccauucacgucuug

SEQ ID NO: 7554 - RNA, 20 nt, Artificial Sequence
  SAMD9 targeting guide sequence portion
gacgugaauggagcgucuug

SEQ ID NO: 7555 - RNA, 20 nt, Artificial Sequence
  SAMD9 targeting guide sequence portion
gacugaacaagacgugaaug

SEQ ID NO: 7556 - RNA, 20 nt, Artificial Sequence
  SAMD9 targeting guide sequence portion
gagcgucuugaagugguuaa

SEQ ID NO: 7557 - RNA, 20 nt, Artificial Sequence
  SAMD9 targeting guide sequence portion
gcgucuugaagugguuaaaa

SEQ ID NO: 7558 - RNA, 20 nt, Artificial Sequence
  SAMD9 targeting guide sequence portion
ggagcgucuugaagugguua

SEQ ID NO: 7559 - RNA, 20 nt, Artificial Sequence
  SAMD9 targeting guide sequence portion
gugaauggagcgucuugaag

SEQ ID NO: 7560 - RNA, 20 nt, Artificial Sequence
  SAMD9 targeting guide sequence portion
uaaccacuucaagacgcucc

SEQ ID NO: 7561 - RNA, 20 nt, Artificial Sequence
  SAMD9 targeting guide sequence portion
ucaagacgcuccauucacgu

SEQ ID NO: 7562 - RNA, 20 nt, Artificial Sequence
  SAMD9 targeting guide sequence portion
ugaacaagacgugaauggag

SEQ ID NO: 7563 - RNA, 20 nt, Artificial Sequence
  SAMD9 targeting guide sequence portion
ugaauggagcgucuugaagu

SEQ ID NO: 7564 - RNA, 20 nt, Artificial Sequence
  SAMD9 targeting guide sequence portion
ugacugaacaagacgugaau

SEQ ID NO: 7565 - RNA, 20 nt, Artificial Sequence
  SAMD9 targeting guide sequence portion
uggagcgucuugaagugguu

SEQ ID NO: 7566 - RNA, 20 nt, Artificial Sequence
  SAMD9 targeting guide sequence portion
uuaaccacuucaagacgcuc

SEQ ID NO: 7567 - RNA, 20 nt, Artificial Sequence
  SAMD9 targeting guide sequence portion
uucaagacgcuccauucacg

SEQ ID NO: 7568 - RNA, 20 nt, Artificial Sequence
  SAMD9 targeting guide sequence portion
uuuaaccacuucaagacgcu

SEQ ID NO: 7569 - RNA, 20 nt, Artificial Sequence
  SAMD9 targeting guide sequence portion
uuuuaaccacuucaagacgc

SEQ ID NO: 7570 - RNA, 20 nt, Artificial Sequence
  SAMD9 targeting guide sequence portion
uuuuuaaccacuucaagacg

SEQ ID NO: 7571 - RNA, 20 nt, Artificial Sequence
  SAMD9 targeting guide sequence portion
uuuuuuaaccacuucaagac

SEQ ID NO: 7572 - RNA, 21 nt, Artificial Sequence
  SAMD9 targeting guide sequence portion
aacaagacgugaauggagcgu

SEQ ID NO: 7573 - RNA, 21 nt, Artificial Sequence
  SAMD9 targeting guide sequence portion
aaccacuucaagacgcuccau

SEQ ID NO: 7574 - RNA, 21 nt, Artificial Sequence
  SAMD9 targeting guide sequence portion
aagacgcuccauucacgucuu

SEQ ID NO: 7575 - RNA, 21 nt, Artificial Sequence
  SAMD9 targeting guide sequence portion
aagacgugaauggagcgucuu

SEQ ID NO: 7576 - RNA, 21 nt, Artificial Sequence
  SAMD9 targeting guide sequence portion
aauggagcgucuugaaguggu

SEQ ID NO: 7577 - RNA, 21 nt, Artificial Sequence
  SAMD9 targeting guide sequence portion
acaagacgugaauggagcguc

SEQ ID NO: 7578 - RNA, 21 nt, Artificial Sequence
  SAMD9 targeting guide sequence portion
accacuucaagacgcuccauu

SEQ ID NO: 7579 - RNA, 21 nt, Artificial Sequence
  SAMD9 targeting guide sequence portion
acgcuccauucacgucuuguu

SEQ ID NO: 7580 - RNA, 21 nt, Artificial Sequence
  SAMD9 targeting guide sequence portion
acgugaauggagcgucuugaa

SEQ ID NO: 7581 - RNA, 21 nt, Artificial Sequence
  SAMD9 targeting guide sequence portion
acugaacaagacgugaaugga

SEQ ID NO: 7582 - RNA, 21 nt, Artificial Sequence
  SAMD9 targeting guide sequence portion
acuucaagacgcuccauucac

SEQ ID NO: 7583 - RNA, 21 nt, Artificial Sequence
  SAMD9 targeting guide sequence portion
agacgcuccauucacgucuug

SEQ ID NO: 7584 - RNA, 21 nt, Artificial Sequence
  SAMD9 targeting guide sequence portion
agacgugaauggagcgucuug

SEQ ID NO: 7585 - RNA, 21 nt, Artificial Sequence
  SAMD9 targeting guide sequence portion
agcgucuugaagugguuaaaa

SEQ ID NO: 7586 - RNA, 21 nt, Artificial Sequence
  SAMD9 targeting guide sequence portion
auggagcgucuugaagugguu

SEQ ID NO: 7587 - RNA, 21 nt, Artificial Sequence
  SAMD9 targeting guide sequence portion
caagacgcuccauucacgucu

SEQ ID NO: 7588 - RNA, 21 nt, Artificial Sequence
  SAMD9 targeting guide sequence portion
caagacgugaauggagcgucu

SEQ ID NO: 7589 - RNA, 21 nt, Artificial Sequence
  SAMD9 targeting guide sequence portion
cacuucaagacgcuccauuca

SEQ ID NO: 7590 - RNA, 21 nt, Artificial Sequence
  SAMD9 targeting guide sequence portion
ccacuucaagacgcuccauuc

SEQ ID NO: 7591 - RNA, 21 nt, Artificial Sequence
  SAMD9 targeting guide sequence portion
cgcuccauucacgucuuguuc

SEQ ID NO: 7592 - RNA, 21 nt, Artificial Sequence
  SAMD9 targeting guide sequence portion
cgucuugaagugguuaaaaaa

SEQ ID NO: 7593 - RNA, 21 nt, Artificial Sequence
  SAMD9 targeting guide sequence portion
cgugaauggagcgucuugaag

SEQ ID NO: 7594 - RNA, 21 nt, Artificial Sequence
  SAMD9 targeting guide sequence portion
cugaacaagacgugaauggag

SEQ ID NO: 7595 - RNA, 21 nt, Artificial Sequence
  SAMD9 targeting guide sequence portion
cuucaagacgcuccauucacg

SEQ ID NO: 7596 - RNA, 21 nt, Artificial Sequence
  SAMD9 targeting guide sequence portion
gaacaagacgugaauggagcg

SEQ ID NO: 7597 - RNA, 21 nt, Artificial Sequence
  SAMD9 targeting guide sequence portion
gaauggagcgucuugaagugg

SEQ ID NO: 7598 - RNA, 21 nt, Artificial Sequence
  SAMD9 targeting guide sequence portion
gacgcuccauucacgucuugu

SEQ ID NO: 7599 - RNA, 21 nt, Artificial Sequence
  SAMD9 targeting guide sequence portion
gacgugaauggagcgucuuga

SEQ ID NO: 7600 - RNA, 21 nt, Artificial Sequence
  SAMD9 targeting guide sequence portion
gacugaacaagacgugaaugg

SEQ ID NO: 7601 - RNA, 21 nt, Artificial Sequence
  SAMD9 targeting guide sequence portion
gagcgucuugaagugguuaaa

SEQ ID NO: 7602 - RNA, 21 nt, Artificial Sequence
  SAMD9 targeting guide sequence portion
gcgucuugaagugguuaaaaa

SEQ ID NO: 7603 - RNA, 21 nt, Artificial Sequence
  SAMD9 targeting guide sequence portion
ggagcgucuugaagugguuaa

SEQ ID NO: 7604 - RNA, 21 nt, Artificial Sequence
  SAMD9 targeting guide sequence portion
gugaauggagcgucuugaagu

SEQ ID NO: 7605 - RNA, 21 nt, Artificial Sequence
  SAMD9 targeting guide sequence portion
uaaccacuucaagacgcucca

SEQ ID NO: 7606 - RNA, 21 nt, Artificial Sequence
  SAMD9 targeting guide sequence portion
ucaagacgcuccauucacguc

SEQ ID NO: 7607 - RNA, 21 nt, Artificial Sequence
  SAMD9 targeting guide sequence portion
ugaacaagacgugaauggagc

SEQ ID NO: 7608 - RNA, 21 nt, Artificial Sequence
  SAMD9 targeting guide sequence portion
ugaauggagcgucuugaagug

SEQ ID NO: 7609 - RNA, 21 nt, Artificial Sequence
  SAMD9 targeting guide sequence portion
ugacugaacaagacgugaaug

SEQ ID NO: 7610 - RNA, 21 nt, Artificial Sequence
  SAMD9 targeting guide sequence portion
uggagcgucuugaagugguua

SEQ ID NO: 7611 - RNA, 21 nt, Artificial Sequence
  SAMD9 targeting guide sequence portion
uuaaccacuucaagacgcucc

SEQ ID NO: 7612 - RNA, 21 nt, Artificial Sequence
  SAMD9 targeting guide sequence portion
uucaagacgcuccauucacgu

SEQ ID NO: 7613 - RNA, 21 nt, Artificial Sequence
  SAMD9 targeting guide sequence portion
uugacugaacaagacgugaau

SEQ ID NO: 7614 - RNA, 21 nt, Artificial Sequence
  SAMD9 targeting guide sequence portion
uuuaaccacuucaagacgcuc

SEQ ID NO: 7615 - RNA, 21 nt, Artificial Sequence
  SAMD9 targeting guide sequence portion
uuuuaaccacuucaagacgcu

SEQ ID NO: 7616 - RNA, 21 nt, Artificial Sequence
  SAMD9 targeting guide sequence portion
uuuuuaaccacuucaagacgc

SEQ ID NO: 7617 - RNA, 21 nt, Artificial Sequence
  SAMD9 targeting guide sequence portion
uuuuuuaaccacuucaagacg

SEQ ID NO: 7618 - RNA, 22 nt, Artificial Sequence
  SAMD9 targeting guide sequence portion
aacaagacgugaauggagcguc

SEQ ID NO: 7619 - RNA, 22 nt, Artificial Sequence
  SAMD9 targeting guide sequence portion
aaccacuucaagacgcuccauu

SEQ ID NO: 7620 - RNA, 22 nt, Artificial Sequence
  SAMD9 targeting guide sequence portion
aagacgcuccauucacgucuug

SEQ ID NO: 7621 - RNA, 22 nt, Artificial Sequence
  SAMD9 targeting guide sequence portion
aagacgugaauggagcgucuug

SEQ ID NO: 7622 - RNA, 22 nt, Artificial Sequence
  SAMD9 targeting guide sequence portion
aauggagcgucuugaagugguu

SEQ ID NO: 7623 - RNA, 22 nt, Artificial Sequence
  SAMD9 targeting guide sequence portion
acaagacgugaauggagcgucu

SEQ ID NO: 7624 - RNA, 22 nt, Artificial Sequence
  SAMD9 targeting guide sequence portion
accacuucaagacgcuccauuc

SEQ ID NO: 7625 - RNA, 22 nt, Artificial Sequence
  SAMD9 targeting guide sequence portion
acgcuccauucacgucuuguuc

SEQ ID NO: 7626 - RNA, 22 nt, Artificial Sequence
  SAMD9 targeting guide sequence portion
acgugaauggagcgucuugaag

SEQ ID NO: 7627 - RNA, 22 nt, Artificial Sequence
  SAMD9 targeting guide sequence portion
acugaacaagacgugaauggag

SEQ ID NO: 7628 - RNA, 22 nt, Artificial Sequence
  SAMD9 targeting guide sequence portion
acuucaagacgcuccauucacg

SEQ ID NO: 7629 - RNA, 22 nt, Artificial Sequence
  SAMD9 targeting guide sequence portion
agacgcuccauucacgucuugu

SEQ ID NO: 7630 - RNA, 22 nt, Artificial Sequence
  SAMD9 targeting guide sequence portion
agacgugaauggagcgucuuga

SEQ ID NO: 7631 - RNA, 22 nt, Artificial Sequence
  SAMD9 targeting guide sequence portion
agcgucuugaagugguuaaaaa

SEQ ID NO: 7632 - RNA, 22 nt, Artificial Sequence
  SAMD9 targeting guide sequence portion
auggagcgucuugaagugguua

SEQ ID NO: 7633 - RNA, 22 nt, Artificial Sequence
  SAMD9 targeting guide sequence portion
caagacgcuccauucacgucuu

SEQ ID NO: 7634 - RNA, 22 nt, Artificial Sequence
  SAMD9 targeting guide sequence portion
caagacgugaauggagcgucuu

SEQ ID NO: 7635 - RNA, 22 nt, Artificial Sequence
  SAMD9 targeting guide sequence portion
cacuucaagacgcuccauucac

SEQ ID NO: 7636 - RNA, 22 nt, Artificial Sequence
  SAMD9 targeting guide sequence portion
ccacuucaagacgcuccauuca

SEQ ID NO: 7637 - RNA, 22 nt, Artificial Sequence
  SAMD9 targeting guide sequence portion
cgcuccauucacgucuuguuca

SEQ ID NO: 7638 - RNA, 22 nt, Artificial Sequence
  SAMD9 targeting guide sequence portion
cgugaauggagcgucuugaagu

SEQ ID NO: 7639 - RNA, 22 nt, Artificial Sequence
  SAMD9 targeting guide sequence portion
cugaacaagacgugaauggagc

SEQ ID NO: 7640 - RNA, 22 nt, Artificial Sequence
  SAMD9 targeting guide sequence portion
cuucaagacgcuccauucacgu

SEQ ID NO: 7641 - RNA, 22 nt, Artificial Sequence
  SAMD9 targeting guide sequence portion
gaacaagacgugaauggagcgu

SEQ ID NO: 7642 - RNA, 22 nt, Artificial Sequence
  SAMD9 targeting guide sequence portion
gaauggagcgucuugaaguggu

SEQ ID NO: 7643 - RNA, 22 nt, Artificial Sequence
  SAMD9 targeting guide sequence portion
gacgcuccauucacgucuuguu

SEQ ID NO: 7644 - RNA, 22 nt, Artificial Sequence
  SAMD9 targeting guide sequence portion
gacgugaauggagcgucuugaa

SEQ ID NO: 7645 - RNA, 22 nt, Artificial Sequence
  SAMD9 targeting guide sequence portion
gacugaacaagacgugaaugga

SEQ ID NO: 7646 - RNA, 22 nt, Artificial Sequence
  SAMD9 targeting guide sequence portion
gagcgucuugaagugguuaaaa

SEQ ID NO: 7647 - RNA, 22 nt, Artificial Sequence
  SAMD9 targeting guide sequence portion
gcgucuugaagugguuaaaaaa

SEQ ID NO: 7648 - RNA, 22 nt, Artificial Sequence
  SAMD9 targeting guide sequence portion
ggagcgucuugaagugguuaaa

SEQ ID NO: 7649 - RNA, 22 nt, Artificial Sequence
  SAMD9 targeting guide sequence portion
gugaauggagcgucuugaagug

SEQ ID NO: 7650 - RNA, 22 nt, Artificial Sequence
  SAMD9 targeting guide sequence portion
uaaccacuucaagacgcuccau

SEQ ID NO: 7651 - RNA, 22 nt, Artificial Sequence
  SAMD9 targeting guide sequence portion
ucaagacgcuccauucacgucu

SEQ ID NO: 7652 - RNA, 22 nt, Artificial Sequence
  SAMD9 targeting guide sequence portion
ugaacaagacgugaauggagcg

SEQ ID NO: 7653 - RNA, 22 nt, Artificial Sequence
  SAMD9 targeting guide sequence portion
ugaauggagcgucuugaagugg

SEQ ID NO: 7654 - RNA, 22 nt, Artificial Sequence
  SAMD9 targeting guide sequence portion
ugacugaacaagacgugaaugg

SEQ ID NO: 7655 - RNA, 22 nt, Artificial Sequence
  SAMD9 targeting guide sequence portion
uggagcgucuugaagugguuaa

SEQ ID NO: 7656 - RNA, 22 nt, Artificial Sequence
  SAMD9 targeting guide sequence portion
uuaaccacuucaagacgcucca

SEQ ID NO: 7657 - RNA, 22 nt, Artificial Sequence
  SAMD9 targeting guide sequence portion
uucaagacgcuccauucacguc

SEQ ID NO: 7658 - RNA, 22 nt, Artificial Sequence
  SAMD9 targeting guide sequence portion
uugacugaacaagacgugaaug

SEQ ID NO: 7659 - RNA, 22 nt, Artificial Sequence
  SAMD9 targeting guide sequence portion
uuuaaccacuucaagacgcucc

SEQ ID NO: 7660 - RNA, 22 nt, Artificial Sequence
  SAMD9 targeting guide sequence portion
uuugacugaacaagacgugaau

SEQ ID NO: 7661 - RNA, 22 nt, Artificial Sequence
  SAMD9 targeting guide sequence portion
uuuuaaccacuucaagacgcuc

SEQ ID NO: 7662 - RNA, 22 nt, Artificial Sequence
  SAMD9 targeting guide sequence portion
uuuuuaaccacuucaagacgcu

SEQ ID NO: 7663 - RNA, 22 nt, Artificial Sequence
  SAMD9 targeting guide sequence portion
uuuuuuaaccacuucaagacgc

SEQ ID NO: 7664 - RNA, 20 nt, Artificial Sequence
  SAMD9 targeting guide sequence portion
aaaaaccagggaaauuuuga

SEQ ID NO: 7665 - RNA, 20 nt, Artificial Sequence
  SAMD9 targeting guide sequence portion
aaaaccagggaaauuuugac

SEQ ID NO: 7666 - RNA, 20 nt, Artificial Sequence
  SAMD9 targeting guide sequence portion
aaaauuucccugguuuuugg

SEQ ID NO: 7667 - RNA, 20 nt, Artificial Sequence
  SAMD9 targeting guide sequence portion
aaaccagggaaauuuugacu

SEQ ID NO: 7668 - RNA, 20 nt, Artificial Sequence
  SAMD9 targeting guide sequence portion
aaagucauaagauugaccaa

SEQ ID NO: 7669 - RNA, 20 nt, Artificial Sequence
  SAMD9 targeting guide sequence portion
aaauuucccugguuuuuggu

SEQ ID NO: 7670 - RNA, 20 nt, Artificial Sequence
  SAMD9 targeting guide sequence portion
aaccagggaaauuuugacug

SEQ ID NO: 7671 - RNA, 20 nt, Artificial Sequence
  SAMD9 targeting guide sequence portion
aagauugaccaaaaaccagg

SEQ ID NO: 7672 - RNA, 20 nt, Artificial Sequence
  SAMD9 targeting guide sequence portion
aagucauaagauugaccaaa

SEQ ID NO: 7673 - RNA, 20 nt, Artificial Sequence
  SAMD9 targeting guide sequence portion
aauuucccugguuuuugguc

SEQ ID NO: 7674 - RNA, 20 nt, Artificial Sequence
  SAMD9 targeting guide sequence portion
accaaaaaccagggaaauuu

SEQ ID NO: 7675 - RNA, 20 nt, Artificial Sequence
  SAMD9 targeting guide sequence portion
accagggaaauuuugacuga

SEQ ID NO: 7676 - RNA, 20 nt, Artificial Sequence
  SAMD9 targeting guide sequence portion
agauugaccaaaaaccaggg

SEQ ID NO: 7677 - RNA, 20 nt, Artificial Sequence
  SAMD9 targeting guide sequence portion
agucaaaauuucccugguuu

SEQ ID NO: 7678 - RNA, 20 nt, Artificial Sequence
  SAMD9 targeting guide sequence portion
agucauaagauugaccaaaa

SEQ ID NO: 7679 - RNA, 20 nt, Artificial Sequence
  SAMD9 targeting guide sequence portion
auaagauugaccaaaaacca

SEQ ID NO: 7680 - RNA, 20 nt, Artificial Sequence
  SAMD9 targeting guide sequence portion
auugaccaaaaaccagggaa

SEQ ID NO: 7681 - RNA, 20 nt, Artificial Sequence
  SAMD9 targeting guide sequence portion
auuucccugguuuuugguca

SEQ ID NO: 7682 - RNA, 20 nt, Artificial Sequence
  SAMD9 targeting guide sequence portion
caaaaaccagggaaauuuug

SEQ ID NO: 7683 - RNA, 20 nt, Artificial Sequence
  SAMD9 targeting guide sequence portion
caaaauuucccugguuuuug

SEQ ID NO: 7684 - RNA, 20 nt, Artificial Sequence
  SAMD9 targeting guide sequence portion
cagucaaaauuucccugguu

SEQ ID NO: 7685 - RNA, 20 nt, Artificial Sequence
  SAMD9 targeting guide sequence portion
cauaagauugaccaaaaacc

SEQ ID NO: 7686 - RNA, 20 nt, Artificial Sequence
  SAMD9 targeting guide sequence portion
ccaaaaaccagggaaauuuu

SEQ ID NO: 7687 - RNA, 20 nt, Artificial Sequence
  SAMD9 targeting guide sequence portion
ccagggaaauuuugacugaa

SEQ ID NO: 7688 - RNA, 20 nt, Artificial Sequence
  SAMD9 targeting guide sequence portion
cccugguuuuuggucaaucu

SEQ ID NO: 7689 - RNA, 20 nt, Artificial Sequence
  SAMD9 targeting guide sequence portion
ccugguuuuuggucaaucuu

SEQ ID NO: 7690 - RNA, 20 nt, Artificial Sequence
  SAMD9 targeting guide sequence portion
cugguuuuuggucaaucuua

SEQ ID NO: 7691 - RNA, 20 nt, Artificial Sequence
  SAMD9 targeting guide sequence portion
cuuguucagucaaaauuucc

SEQ ID NO: 7692 - RNA, 20 nt, Artificial Sequence
  SAMD9 targeting guide sequence portion
gaaagucauaagauugacca

SEQ ID NO: 7693 - RNA, 20 nt, Artificial Sequence
  SAMD9 targeting guide sequence portion
gaccaaaaaccagggaaauu

SEQ ID NO: 7694 - RNA, 20 nt, Artificial Sequence
  SAMD9 targeting guide sequence portion
gauugaccaaaaaccaggga

SEQ ID NO: 7695 - RNA, 20 nt, Artificial Sequence
  SAMD9 targeting guide sequence portion
gguuuuuggucaaucuuaug

SEQ ID NO: 7696 - RNA, 20 nt, Artificial Sequence
  SAMD9 targeting guide sequence portion
gucaaaauuucccugguuuu

SEQ ID NO: 7697 - RNA, 20 nt, Artificial Sequence
  SAMD9 targeting guide sequence portion
gucauaagauugaccaaaaa

SEQ ID NO: 7698 - RNA, 20 nt, Artificial Sequence
  SAMD9 targeting guide sequence portion
gucuuguucagucaaaauuu

SEQ ID NO: 7699 - RNA, 20 nt, Artificial Sequence
  SAMD9 targeting guide sequence portion
guucagucaaaauuucccug

SEQ ID NO: 7700 - RNA, 20 nt, Artificial Sequence
  SAMD9 targeting guide sequence portion
uaagauugaccaaaaaccag

SEQ ID NO: 7701 - RNA, 20 nt, Artificial Sequence
  SAMD9 targeting guide sequence portion
ucaaaauuucccugguuuuu

SEQ ID NO: 7702 - RNA, 20 nt, Artificial Sequence
  SAMD9 targeting guide sequence portion
ucagucaaaauuucccuggu

SEQ ID NO: 7703 - RNA, 20 nt, Artificial Sequence
  SAMD9 targeting guide sequence portion
ucauaagauugaccaaaaac

SEQ ID NO: 7704 - RNA, 20 nt, Artificial Sequence
  SAMD9 targeting guide sequence portion
ucccugguuuuuggucaauc

SEQ ID NO: 7705 - RNA, 20 nt, Artificial Sequence
  SAMD9 targeting guide sequence portion
ucuuguucagucaaaauuuc

SEQ ID NO: 7706 - RNA, 20 nt, Artificial Sequence
  SAMD9 targeting guide sequence portion
ugaccaaaaaccagggaaau

SEQ ID NO: 7707 - RNA, 20 nt, Artificial Sequence
  SAMD9 targeting guide sequence portion
ugguuuuuggucaaucuuau

SEQ ID NO: 7708 - RNA, 20 nt, Artificial Sequence
  SAMD9 targeting guide sequence portion
uguucagucaaaauuucccu

SEQ ID NO: 7709 - RNA, 20 nt, Artificial Sequence
  SAMD9 targeting guide sequence portion
uucagucaaaauuucccugg

SEQ ID NO: 7710 - RNA, 20 nt, Artificial Sequence
  SAMD9 targeting guide sequence portion
uucccugguuuuuggucaau

SEQ ID NO: 7711 - RNA, 20 nt, Artificial Sequence
  SAMD9 targeting guide sequence portion
uugaccaaaaaccagggaaa

SEQ ID NO: 7712 - RNA, 20 nt, Artificial Sequence
  SAMD9 targeting guide sequence portion
uuguucagucaaaauuuccc

SEQ ID NO: 7713 - RNA, 20 nt, Artificial Sequence
  SAMD9 targeting guide sequence portion
uuucccugguuuuuggucaa

SEQ ID NO: 7714 - RNA, 21 nt, Artificial Sequence
  SAMD9 targeting guide sequence portion
aaaaaccagggaaauuuugac

SEQ ID NO: 7715 - RNA, 21 nt, Artificial Sequence
  SAMD9 targeting guide sequence portion
aaaaccagggaaauuuugacu

SEQ ID NO: 7716 - RNA, 21 nt, Artificial Sequence
  SAMD9 targeting guide sequence portion
aaaauuucccugguuuuuggu

SEQ ID NO: 7717 - RNA, 21 nt, Artificial Sequence
  SAMD9 targeting guide sequence portion
aaaccagggaaauuuugacug

SEQ ID NO: 7718 - RNA, 21 nt, Artificial Sequence
  SAMD9 targeting guide sequence portion
aaagucauaagauugaccaaa

SEQ ID NO: 7719 - RNA, 21 nt, Artificial Sequence
  SAMD9 targeting guide sequence portion
aaauuucccugguuuuugguc

SEQ ID NO: 7720 - RNA, 21 nt, Artificial Sequence
  SAMD9 targeting guide sequence portion
aaccagggaaauuuugacuga

SEQ ID NO: 7721 - RNA, 21 nt, Artificial Sequence
  SAMD9 targeting guide sequence portion
aagauugaccaaaaaccaggg

SEQ ID NO: 7722 - RNA, 21 nt, Artificial Sequence
  SAMD9 targeting guide sequence portion
aagucauaagauugaccaaaa

SEQ ID NO: 7723 - RNA, 21 nt, Artificial Sequence
  SAMD9 targeting guide sequence portion
aauuucccugguuuuugguca

SEQ ID NO: 7724 - RNA, 21 nt, Artificial Sequence
  SAMD9 targeting guide sequence portion
accaaaaaccagggaaauuuu

SEQ ID NO: 7725 - RNA, 21 nt, Artificial Sequence
  SAMD9 targeting guide sequence portion
accagggaaauuuugacugaa

SEQ ID NO: 7726 - RNA, 21 nt, Artificial Sequence
  SAMD9 targeting guide sequence portion
agaaagucauaagauugacca

SEQ ID NO: 7727 - RNA, 21 nt, Artificial Sequence
  SAMD9 targeting guide sequence portion
agauugaccaaaaaccaggga

SEQ ID NO: 7728 - RNA, 21 nt, Artificial Sequence
  SAMD9 targeting guide sequence portion
agucaaaauuucccugguuuu

SEQ ID NO: 7729 - RNA, 21 nt, Artificial Sequence
  SAMD9 targeting guide sequence portion
agucauaagauugaccaaaaa

SEQ ID NO: 7730 - RNA, 21 nt, Artificial Sequence
  SAMD9 targeting guide sequence portion
auaagauugaccaaaaaccag

SEQ ID NO: 7731 - RNA, 21 nt, Artificial Sequence
  SAMD9 targeting guide sequence portion
auugaccaaaaaccagggaaa

SEQ ID NO: 7732 - RNA, 21 nt, Artificial Sequence
  SAMD9 targeting guide sequence portion
auuucccugguuuuuggucaa

SEQ ID NO: 7733 - RNA, 21 nt, Artificial Sequence
  SAMD9 targeting guide sequence portion
caaaaaccagggaaauuuuga

SEQ ID NO: 7734 - RNA, 21 nt, Artificial Sequence
  SAMD9 targeting guide sequence portion
caaaauuucccugguuuuugg

SEQ ID NO: 7735 - RNA, 21 nt, Artificial Sequence
  SAMD9 targeting guide sequence portion
cagucaaaauuucccugguuu

SEQ ID NO: 7736 - RNA, 21 nt, Artificial Sequence
  SAMD9 targeting guide sequence portion
cauaagauugaccaaaaacca

SEQ ID NO: 7737 - RNA, 21 nt, Artificial Sequence
  SAMD9 targeting guide sequence portion
ccaaaaaccagggaaauuuug

SEQ ID NO: 7738 - RNA, 21 nt, Artificial Sequence
  SAMD9 targeting guide sequence portion
ccagggaaauuuugacugaac

SEQ ID NO: 7739 - RNA, 21 nt, Artificial Sequence
  SAMD9 targeting guide sequence portion
cccugguuuuuggucaaucuu

SEQ ID NO: 7740 - RNA, 21 nt, Artificial Sequence
  SAMD9 targeting guide sequence portion
ccugguuuuuggucaaucuua

SEQ ID NO: 7741 - RNA, 21 nt, Artificial Sequence
  SAMD9 targeting guide sequence portion
cgucuuguucagucaaaauuu

SEQ ID NO: 7742 - RNA, 21 nt, Artificial Sequence
  SAMD9 targeting guide sequence portion
cugguuuuuggucaaucuuau

SEQ ID NO: 7743 - RNA, 21 nt, Artificial Sequence
  SAMD9 targeting guide sequence portion
cuuguucagucaaaauuuccc

SEQ ID NO: 7744 - RNA, 21 nt, Artificial Sequence
  SAMD9 targeting guide sequence portion
gaaagucauaagauugaccaa

SEQ ID NO: 7745 - RNA, 21 nt, Artificial Sequence
  SAMD9 targeting guide sequence portion
gaccaaaaaccagggaaauuu

SEQ ID NO: 7746 - RNA, 21 nt, Artificial Sequence
  SAMD9 targeting guide sequence portion
gauugaccaaaaaccagggaa

SEQ ID NO: 7747 - RNA, 21 nt, Artificial Sequence
  SAMD9 targeting guide sequence portion
gguuuuuggucaaucuuauga

SEQ ID NO: 7748 - RNA, 21 nt, Artificial Sequence
  SAMD9 targeting guide sequence portion
gucaaaauuucccugguuuuu

SEQ ID NO: 7749 - RNA, 21 nt, Artificial Sequence
  SAMD9 targeting guide sequence portion
gucauaagauugaccaaaaac

SEQ ID NO: 7750 - RNA, 21 nt, Artificial Sequence
  SAMD9 targeting guide sequence portion
gucuuguucagucaaaauuuc

SEQ ID NO: 7751 - RNA, 21 nt, Artificial Sequence
  SAMD9 targeting guide sequence portion
guucagucaaaauuucccugg

SEQ ID NO: 7752 - RNA, 21 nt, Artificial Sequence
  SAMD9 targeting guide sequence portion
uaagauugaccaaaaaccagg

SEQ ID NO: 7753 - RNA, 21 nt, Artificial Sequence
  SAMD9 targeting guide sequence portion
ucaaaauuucccugguuuuug

SEQ ID NO: 7754 - RNA, 21 nt, Artificial Sequence
  SAMD9 targeting guide sequence portion
ucagucaaaauuucccugguu

SEQ ID NO: 7755 - RNA, 21 nt, Artificial Sequence
  SAMD9 targeting guide sequence portion
ucauaagauugaccaaaaacc

SEQ ID NO: 7756 - RNA, 21 nt, Artificial Sequence
  SAMD9 targeting guide sequence portion
ucccugguuuuuggucaaucu

SEQ ID NO: 7757 - RNA, 21 nt, Artificial Sequence
  SAMD9 targeting guide sequence portion
ucuuguucagucaaaauuucc

SEQ ID NO: 7758 - RNA, 21 nt, Artificial Sequence
  SAMD9 targeting guide sequence portion
ugaccaaaaaccagggaaauu

SEQ ID NO: 7759 - RNA, 21 nt, Artificial Sequence
  SAMD9 targeting guide sequence portion
ugguuuuuggucaaucuuaug

SEQ ID NO: 7760 - RNA, 21 nt, Artificial Sequence
  SAMD9 targeting guide sequence portion
uguucagucaaaauuucccug

SEQ ID NO: 7761 - RNA, 21 nt, Artificial Sequence
  SAMD9 targeting guide sequence portion
uucagucaaaauuucccuggu

SEQ ID NO: 7762 - RNA, 21 nt, Artificial Sequence
  SAMD9 targeting guide sequence portion
uucccugguuuuuggucaauc

SEQ ID NO: 7763 - RNA, 21 nt, Artificial Sequence
  SAMD9 targeting guide sequence portion
uugaccaaaaaccagggaaau

SEQ ID NO: 7764 - RNA, 21 nt, Artificial Sequence
  SAMD9 targeting guide sequence portion
uuguucagucaaaauuucccu

SEQ ID NO: 7765 - RNA, 21 nt, Artificial Sequence
  SAMD9 targeting guide sequence portion
uuucccugguuuuuggucaau

SEQ ID NO: 7766 - RNA, 22 nt, Artificial Sequence
  SAMD9 targeting guide sequence portion
aaaaaccagggaaauuuugacu

SEQ ID NO: 7767 - RNA, 22 nt, Artificial Sequence
  SAMD9 targeting guide sequence portion
aaaaccagggaaauuuugacug

SEQ ID NO: 7768 - RNA, 22 nt, Artificial Sequence
  SAMD9 targeting guide sequence portion
aaaauuucccugguuuuugguc

SEQ ID NO: 7769 - RNA, 22 nt, Artificial Sequence
  SAMD9 targeting guide sequence portion
aaaccagggaaauuuugacuga

SEQ ID NO: 7770 - RNA, 22 nt, Artificial Sequence
  SAMD9 targeting guide sequence portion
aaagucauaagauugaccaaaa

SEQ ID NO: 7771 - RNA, 22 nt, Artificial Sequence
  SAMD9 targeting guide sequence portion
aaauuucccugguuuuugguca

SEQ ID NO: 7772 - RNA, 22 nt, Artificial Sequence
  SAMD9 targeting guide sequence portion
aaccagggaaauuuugacugaa

SEQ ID NO: 7773 - RNA, 22 nt, Artificial Sequence
  SAMD9 targeting guide sequence portion
aagauugaccaaaaaccaggga

SEQ ID NO: 7774 - RNA, 22 nt, Artificial Sequence
  SAMD9 targeting guide sequence portion
aagucauaagauugaccaaaaa

SEQ ID NO: 7775 - RNA, 22 nt, Artificial Sequence
  SAMD9 targeting guide sequence portion
aauuucccugguuuuuggucaa

SEQ ID NO: 7776 - RNA, 22 nt, Artificial Sequence
  SAMD9 targeting guide sequence portion
accaaaaaccagggaaauuuug

SEQ ID NO: 7777 - RNA, 22 nt, Artificial Sequence
  SAMD9 targeting guide sequence portion
accagggaaauuuugacugaac

SEQ ID NO: 7778 - RNA, 22 nt, Artificial Sequence
  SAMD9 targeting guide sequence portion
acgucuuguucagucaaaauuu

SEQ ID NO: 7779 - RNA, 22 nt, Artificial Sequence
  SAMD9 targeting guide sequence portion
agaaagucauaagauugaccaa

SEQ ID NO: 7780 - RNA, 22 nt, Artificial Sequence
  SAMD9 targeting guide sequence portion
agauugaccaaaaaccagggaa

SEQ ID NO: 7781 - RNA, 22 nt, Artificial Sequence
  SAMD9 targeting guide sequence portion
agucaaaauuucccugguuuuu

SEQ ID NO: 7782 - RNA, 22 nt, Artificial Sequence
  SAMD9 targeting guide sequence portion
agucauaagauugaccaaaaac

SEQ ID NO: 7783 - RNA, 22 nt, Artificial Sequence
  SAMD9 targeting guide sequence portion
auaagauugaccaaaaaccagg

SEQ ID NO: 7784 - RNA, 22 nt, Artificial Sequence
  SAMD9 targeting guide sequence portion
auugaccaaaaaccagggaaau

SEQ ID NO: 7785 - RNA, 22 nt, Artificial Sequence
  SAMD9 targeting guide sequence portion
auuucccugguuuuuggucaau

SEQ ID NO: 7786 - RNA, 22 nt, Artificial Sequence
  SAMD9 targeting guide sequence portion
caaaaaccagggaaauuuugac

SEQ ID NO: 7787 - RNA, 22 nt, Artificial Sequence
  SAMD9 targeting guide sequence portion
caaaauuucccugguuuuuggu

SEQ ID NO: 7788 - RNA, 22 nt, Artificial Sequence
  SAMD9 targeting guide sequence portion
cagucaaaauuucccugguuuu

SEQ ID NO: 7789 - RNA, 22 nt, Artificial Sequence
  SAMD9 targeting guide sequence portion
cauaagauugaccaaaaaccag

SEQ ID NO: 7790 - RNA, 22 nt, Artificial Sequence
  SAMD9 targeting guide sequence portion
ccaaaaaccagggaaauuuuga

SEQ ID NO: 7791 - RNA, 22 nt, Artificial Sequence
  SAMD9 targeting guide sequence portion
ccagggaaauuuugacugaaca

SEQ ID NO: 7792 - RNA, 22 nt, Artificial Sequence
  SAMD9 targeting guide sequence portion
cccugguuuuuggucaaucuua

SEQ ID NO: 7793 - RNA, 22 nt, Artificial Sequence
  SAMD9 targeting guide sequence portion
ccugguuuuuggucaaucuuau

SEQ ID NO: 7794 - RNA, 22 nt, Artificial Sequence
  SAMD9 targeting guide sequence portion
cgucuuguucagucaaaauuuc

SEQ ID NO: 7795 - RNA, 22 nt, Artificial Sequence
  SAMD9 targeting guide sequence portion
cugguuuuuggucaaucuuaug

SEQ ID NO: 7796 - RNA, 22 nt, Artificial Sequence
  SAMD9 targeting guide sequence portion
cuuguucagucaaaauuucccu

SEQ ID NO: 7797 - RNA, 22 nt, Artificial Sequence
  SAMD9 targeting guide sequence portion
gaaagucauaagauugaccaaa

SEQ ID NO: 7798 - RNA, 22 nt, Artificial Sequence
  SAMD9 targeting guide sequence portion
gaccaaaaaccagggaaauuuu

SEQ ID NO: 7799 - RNA, 22 nt, Artificial Sequence
  SAMD9 targeting guide sequence portion
gauugaccaaaaaccagggaaa

SEQ ID NO: 7800 - RNA, 22 nt, Artificial Sequence
  SAMD9 targeting guide sequence portion
gguuuuuggucaaucuuaugac

SEQ ID NO: 7801 - RNA, 22 nt, Artificial Sequence
  SAMD9 targeting guide sequence portion
gucaaaauuucccugguuuuug

SEQ ID NO: 7802 - RNA, 22 nt, Artificial Sequence
  SAMD9 targeting guide sequence portion
gucauaagauugaccaaaaacc

SEQ ID NO: 7803 - RNA, 22 nt, Artificial Sequence
  SAMD9 targeting guide sequence portion
gucuuguucagucaaaauuucc

SEQ ID NO: 7804 - RNA, 22 nt, Artificial Sequence
  SAMD9 targeting guide sequence portion
guucagucaaaauuucccuggu

SEQ ID NO: 7805 - RNA, 22 nt, Artificial Sequence
  SAMD9 targeting guide sequence portion
uaagauugaccaaaaaccaggg

SEQ ID NO: 7806 - RNA, 22 nt, Artificial Sequence
  SAMD9 targeting guide sequence portion
uagaaagucauaagauugacca

SEQ ID NO: 7807 - RNA, 22 nt, Artificial Sequence
  SAMD9 targeting guide sequence portion
ucaaaauuucccugguuuuugg

SEQ ID NO: 7808 - RNA, 22 nt, Artificial Sequence
  SAMD9 targeting guide sequence portion
ucagucaaaauuucccugguuu

SEQ ID NO: 7809 - RNA, 22 nt, Artificial Sequence
  SAMD9 targeting guide sequence portion
ucauaagauugaccaaaaacca

SEQ ID NO: 7810 - RNA, 22 nt, Artificial Sequence
  SAMD9 targeting guide sequence portion
ucccugguuuuuggucaaucuu

SEQ ID NO: 7811 - RNA, 22 nt, Artificial Sequence
  SAMD9 targeting guide sequence portion
ucuuguucagucaaaauuuccc

SEQ ID NO: 7812 - RNA, 22 nt, Artificial Sequence
  SAMD9 targeting guide sequence portion
ugaccaaaaaccagggaaauuu

SEQ ID NO: 7813 - RNA, 22 nt, Artificial Sequence
  SAMD9 targeting guide sequence portion
ugguuuuuggucaaucuuauga

SEQ ID NO: 7814 - RNA, 22 nt, Artificial Sequence
  SAMD9 targeting guide sequence portion
uguucagucaaaauuucccugg

SEQ ID NO: 7815 - RNA, 22 nt, Artificial Sequence
  SAMD9 targeting guide sequence portion
uucagucaaaauuucccugguu

SEQ ID NO: 7816 - RNA, 22 nt, Artificial Sequence
  SAMD9 targeting guide sequence portion
uucccugguuuuuggucaaucu

SEQ ID NO: 7817 - RNA, 22 nt, Artificial Sequence
  SAMD9 targeting guide sequence portion
uugaccaaaaaccagggaaauu

SEQ ID NO: 7818 - RNA, 22 nt, Artificial Sequence
  SAMD9 targeting guide sequence portion
uuguucagucaaaauuucccug

SEQ ID NO: 7819 - RNA, 22 nt, Artificial Sequence
  SAMD9 targeting guide sequence portion
uuucccugguuuuuggucaauc

SEQ ID NO: 7820 - RNA, 20 nt, Artificial Sequence
  SAMD9 targeting guide sequence portion
aaaaacucagggaaauuuug

SEQ ID NO: 7821 - RNA, 20 nt, Artificial Sequence
  SAMD9 targeting guide sequence portion
aaaacucagggaaauuuuga

SEQ ID NO: 7822 - RNA, 20 nt, Artificial Sequence
  SAMD9 targeting guide sequence portion
aaaauuucccugaguuuuug

SEQ ID NO: 7823 - RNA, 20 nt, Artificial Sequence
  SAMD9 targeting guide sequence portion
aaacucagggaaauuuugac

SEQ ID NO: 7824 - RNA, 20 nt, Artificial Sequence
  SAMD9 targeting guide sequence portion
aaauuucccugaguuuuugg

SEQ ID NO: 7825 - RNA, 20 nt, Artificial Sequence
  SAMD9 targeting guide sequence portion
aacucagggaaauuuugacu

SEQ ID NO: 7826 - RNA, 20 nt, Artificial Sequence
  SAMD9 targeting guide sequence portion
aagauugaccaaaaacucag

SEQ ID NO: 7827 - RNA, 20 nt, Artificial Sequence
  SAMD9 targeting guide sequence portion
aauuucccugaguuuuuggu

SEQ ID NO: 7828 - RNA, 20 nt, Artificial Sequence
  SAMD9 targeting guide sequence portion
accaaaaacucagggaaauu

SEQ ID NO: 7829 - RNA, 20 nt, Artificial Sequence
  SAMD9 targeting guide sequence portion
acucagggaaauuuugacug

SEQ ID NO: 7830 - RNA, 20 nt, Artificial Sequence
  SAMD9 targeting guide sequence portion
agauugaccaaaaacucagg

SEQ ID NO: 7831 - RNA, 20 nt, Artificial Sequence
  SAMD9 targeting guide sequence portion
agucaaaauuucccugaguu

SEQ ID NO: 7832 - RNA, 20 nt, Artificial Sequence
  SAMD9 targeting guide sequence portion
aguuuuuggucaaucuuaug

SEQ ID NO: 7833 - RNA, 20 nt, Artificial Sequence
  SAMD9 targeting guide sequence portion
auaagauugaccaaaaacuc

SEQ ID NO: 7834 - RNA, 20 nt, Artificial Sequence
  SAMD9 targeting guide sequence portion
auugaccaaaaacucaggga

SEQ ID NO: 7835 - RNA, 20 nt, Artificial Sequence
  SAMD9 targeting guide sequence portion
auuucccugaguuuuugguc

SEQ ID NO: 7836 - RNA, 20 nt, Artificial Sequence
  SAMD9 targeting guide sequence portion
caaaaacucagggaaauuuu

SEQ ID NO: 7837 - RNA, 20 nt, Artificial Sequence
  SAMD9 targeting guide sequence portion
caaaauuucccugaguuuuu

SEQ ID NO: 7838 - RNA, 20 nt, Artificial Sequence
  SAMD9 targeting guide sequence portion
cagucaaaauuucccugagu

SEQ ID NO: 7839 - RNA, 20 nt, Artificial Sequence
  SAMD9 targeting guide sequence portion
cauaagauugaccaaaaacu

SEQ ID NO: 7840 - RNA, 20 nt, Artificial Sequence
  SAMD9 targeting guide sequence portion
ccaaaaacucagggaaauuu

SEQ ID NO: 7841 - RNA, 20 nt, Artificial Sequence
  SAMD9 targeting guide sequence portion
cccugaguuuuuggucaauc

SEQ ID NO: 7842 - RNA, 20 nt, Artificial Sequence
  SAMD9 targeting guide sequence portion
ccugaguuuuuggucaaucu

SEQ ID NO: 7843 - RNA, 20 nt, Artificial Sequence
  SAMD9 targeting guide sequence portion
cucagggaaauuuugacuga

SEQ ID NO: 7844 - RNA, 20 nt, Artificial Sequence
  SAMD9 targeting guide sequence portion
cugaguuuuuggucaaucuu

SEQ ID NO: 7845 - RNA, 20 nt, Artificial Sequence
  SAMD9 targeting guide sequence portion
gaccaaaaacucagggaaau

SEQ ID NO: 7846 - RNA, 20 nt, Artificial Sequence
  SAMD9 targeting guide sequence portion
gaguuuuuggucaaucuuau

SEQ ID NO: 7847 - RNA, 20 nt, Artificial Sequence
  SAMD9 targeting guide sequence portion
gauugaccaaaaacucaggg

SEQ ID NO: 7848 - RNA, 20 nt, Artificial Sequence
  SAMD9 targeting guide sequence portion
gucaaaauuucccugaguuu

SEQ ID NO: 7849 - RNA, 20 nt, Artificial Sequence
  SAMD9 targeting guide sequence portion
uaagauugaccaaaaacuca

SEQ ID NO: 7850 - RNA, 20 nt, Artificial Sequence
  SAMD9 targeting guide sequence portion
ucaaaauuucccugaguuuu

SEQ ID NO: 7851 - RNA, 20 nt, Artificial Sequence
  SAMD9 targeting guide sequence portion
ucagggaaauuuugacugaa

SEQ ID NO: 7852 - RNA, 20 nt, Artificial Sequence
  SAMD9 targeting guide sequence portion
ucagucaaaauuucccugag

SEQ ID NO: 7853 - RNA, 20 nt, Artificial Sequence
  SAMD9 targeting guide sequence portion
ucccugaguuuuuggucaau

SEQ ID NO: 7854 - RNA, 20 nt, Artificial Sequence
  SAMD9 targeting guide sequence portion
ugaccaaaaacucagggaaa

SEQ ID NO: 7855 - RNA, 20 nt, Artificial Sequence
  SAMD9 targeting guide sequence portion
ugaguuuuuggucaaucuua

SEQ ID NO: 7856 - RNA, 20 nt, Artificial Sequence
  SAMD9 targeting guide sequence portion
uucagucaaaauuucccuga

SEQ ID NO: 7857 - RNA, 20 nt, Artificial Sequence
  SAMD9 targeting guide sequence portion
uucccugaguuuuuggucaa

SEQ ID NO: 7858 - RNA, 20 nt, Artificial Sequence
  SAMD9 targeting guide sequence portion
uugaccaaaaacucagggaa

SEQ ID NO: 7859 - RNA, 20 nt, Artificial Sequence
  SAMD9 targeting guide sequence portion
uuucccugaguuuuugguca

SEQ ID NO: 7860 - RNA, 21 nt, Artificial Sequence
  SAMD9 targeting guide sequence portion
aaaaacucagggaaauuuuga

SEQ ID NO: 7861 - RNA, 21 nt, Artificial Sequence
  SAMD9 targeting guide sequence portion
aaaacucagggaaauuuugac

SEQ ID NO: 7862 - RNA, 21 nt, Artificial Sequence
  SAMD9 targeting guide sequence portion
aaaauuucccugaguuuuugg

SEQ ID NO: 7863 - RNA, 21 nt, Artificial Sequence
  SAMD9 targeting guide sequence portion
aaacucagggaaauuuugacu

SEQ ID NO: 7864 - RNA, 21 nt, Artificial Sequence
  SAMD9 targeting guide sequence portion
aaauuucccugaguuuuuggu

SEQ ID NO: 7865 - RNA, 21 nt, Artificial Sequence
  SAMD9 targeting guide sequence portion
aacucagggaaauuuugacug

SEQ ID NO: 7866 - RNA, 21 nt, Artificial Sequence
  SAMD9 targeting guide sequence portion
aagauugaccaaaaacucagg

SEQ ID NO: 7867 - RNA, 21 nt, Artificial Sequence
  SAMD9 targeting guide sequence portion
aauuucccugaguuuuugguc

SEQ ID NO: 7868 - RNA, 21 nt, Artificial Sequence
  SAMD9 targeting guide sequence portion
accaaaaacucagggaaauuu

SEQ ID NO: 7869 - RNA, 21 nt, Artificial Sequence
  SAMD9 targeting guide sequence portion
acucagggaaauuuugacuga

SEQ ID NO: 7870 - RNA, 21 nt, Artificial Sequence
  SAMD9 targeting guide sequence portion
agauugaccaaaaacucaggg

SEQ ID NO: 7871 - RNA, 21 nt, Artificial Sequence
  SAMD9 targeting guide sequence portion
agucaaaauuucccugaguuu

SEQ ID NO: 7872 - RNA, 21 nt, Artificial Sequence
  SAMD9 targeting guide sequence portion
aguuuuuggucaaucuuauga

SEQ ID NO: 7873 - RNA, 21 nt, Artificial Sequence
  SAMD9 targeting guide sequence portion
auaagauugaccaaaaacuca

SEQ ID NO: 7874 - RNA, 21 nt, Artificial Sequence
  SAMD9 targeting guide sequence portion
auugaccaaaaacucagggaa

SEQ ID NO: 7875 - RNA, 21 nt, Artificial Sequence
  SAMD9 targeting guide sequence portion
auuucccugaguuuuugguca

SEQ ID NO: 7876 - RNA, 21 nt, Artificial Sequence
  SAMD9 targeting guide sequence portion
caaaaacucagggaaauuuug

SEQ ID NO: 7877 - RNA, 21 nt, Artificial Sequence
  SAMD9 targeting guide sequence portion
caaaauuucccugaguuuuug

SEQ ID NO: 7878 - RNA, 21 nt, Artificial Sequence
  SAMD9 targeting guide sequence portion
cagucaaaauuucccugaguu

SEQ ID NO: 7879 - RNA, 21 nt, Artificial Sequence
  SAMD9 targeting guide sequence portion
cauaagauugaccaaaaacuc

SEQ ID NO: 7880 - RNA, 21 nt, Artificial Sequence
  SAMD9 targeting guide sequence portion
ccaaaaacucagggaaauuuu

SEQ ID NO: 7881 - RNA, 21 nt, Artificial Sequence
  SAMD9 targeting guide sequence portion
cccugaguuuuuggucaaucu

SEQ ID NO: 7882 - RNA, 21 nt, Artificial Sequence
  SAMD9 targeting guide sequence portion
ccugaguuuuuggucaaucuu

SEQ ID NO: 7883 - RNA, 21 nt, Artificial Sequence
  SAMD9 targeting guide sequence portion
cucagggaaauuuugacugaa

SEQ ID NO: 7884 - RNA, 21 nt, Artificial Sequence
  SAMD9 targeting guide sequence portion
cugaguuuuuggucaaucuua

SEQ ID NO: 7885 - RNA, 21 nt, Artificial Sequence
  SAMD9 targeting guide sequence portion
gaccaaaaacucagggaaauu

SEQ ID NO: 7886 - RNA, 21 nt, Artificial Sequence
  SAMD9 targeting guide sequence portion
gaguuuuuggucaaucuuaug

SEQ ID NO: 7887 - RNA, 21 nt, Artificial Sequence
  SAMD9 targeting guide sequence portion
gauugaccaaaaacucaggga

SEQ ID NO: 7888 - RNA, 21 nt, Artificial Sequence
  SAMD9 targeting guide sequence portion
gucaaaauuucccugaguuuu

SEQ ID NO: 7889 - RNA, 21 nt, Artificial Sequence
  SAMD9 targeting guide sequence portion
guucagucaaaauuucccuga

SEQ ID NO: 7890 - RNA, 21 nt, Artificial Sequence
  SAMD9 targeting guide sequence portion
uaagauugaccaaaaacucag

SEQ ID NO: 7891 - RNA, 21 nt, Artificial Sequence
  SAMD9 targeting guide sequence portion
ucaaaauuucccugaguuuuu

SEQ ID NO: 7892 - RNA, 21 nt, Artificial Sequence
  SAMD9 targeting guide sequence portion
ucagggaaauuuugacugaac

SEQ ID NO: 7893 - RNA, 21 nt, Artificial Sequence
  SAMD9 targeting guide sequence portion
ucagucaaaauuucccugagu

SEQ ID NO: 7894 - RNA, 21 nt, Artificial Sequence
  SAMD9 targeting guide sequence portion
ucauaagauugaccaaaaacu

SEQ ID NO: 7895 - RNA, 21 nt, Artificial Sequence
  SAMD9 targeting guide sequence portion
ucccugaguuuuuggucaauc

SEQ ID NO: 7896 - RNA, 21 nt, Artificial Sequence
  SAMD9 targeting guide sequence portion
ugaccaaaaacucagggaaau

SEQ ID NO: 7897 - RNA, 21 nt, Artificial Sequence
  SAMD9 targeting guide sequence portion
ugaguuuuuggucaaucuuau

SEQ ID NO: 7898 - RNA, 21 nt, Artificial Sequence
  SAMD9 targeting guide sequence portion
uucagucaaaauuucccugag

SEQ ID NO: 7899 - RNA, 21 nt, Artificial Sequence
  SAMD9 targeting guide sequence portion
uucccugaguuuuuggucaau

SEQ ID NO: 7900 - RNA, 21 nt, Artificial Sequence
  SAMD9 targeting guide sequence portion
uugaccaaaaacucagggaaa

SEQ ID NO: 7901 - RNA, 21 nt, Artificial Sequence
  SAMD9 targeting guide sequence portion
uuucccugaguuuuuggucaa

SEQ ID NO: 7902 - RNA, 22 nt, Artificial Sequence
  SAMD9 targeting guide sequence portion
aaaaacucagggaaauuuugac

SEQ ID NO: 7903 - RNA, 22 nt, Artificial Sequence
  SAMD9 targeting guide sequence portion
aaaacucagggaaauuuugacu

SEQ ID NO: 7904 - RNA, 22 nt, Artificial Sequence
  SAMD9 targeting guide sequence portion
aaaauuucccugaguuuuuggu

SEQ ID NO: 7905 - RNA, 22 nt, Artificial Sequence
  SAMD9 targeting guide sequence portion
aaacucagggaaauuuugacug

SEQ ID NO: 7906 - RNA, 22 nt, Artificial Sequence
  SAMD9 targeting guide sequence portion
aaauuucccugaguuuuugguc

SEQ ID NO: 7907 - RNA, 22 nt, Artificial Sequence
  SAMD9 targeting guide sequence portion
aacucagggaaauuuugacuga

SEQ ID NO: 7908 - RNA, 22 nt, Artificial Sequence
  SAMD9 targeting guide sequence portion
aagauugaccaaaaacucaggg

SEQ ID NO: 7909 - RNA, 22 nt, Artificial Sequence
  SAMD9 targeting guide sequence portion
aauuucccugaguuuuugguca

SEQ ID NO: 7910 - RNA, 22 nt, Artificial Sequence
  SAMD9 targeting guide sequence portion
accaaaaacucagggaaauuuu

SEQ ID NO: 7911 - RNA, 22 nt, Artificial Sequence
  SAMD9 targeting guide sequence portion
acucagggaaauuuugacugaa

SEQ ID NO: 7912 - RNA, 22 nt, Artificial Sequence
  SAMD9 targeting guide sequence portion
agauugaccaaaaacucaggga

SEQ ID NO: 7913 - RNA, 22 nt, Artificial Sequence
  SAMD9 targeting guide sequence portion
agucaaaauuucccugaguuuu

SEQ ID NO: 7914 - RNA, 22 nt, Artificial Sequence
  SAMD9 targeting guide sequence portion
aguuuuuggucaaucuuaugac

SEQ ID NO: 7915 - RNA, 22 nt, Artificial Sequence
  SAMD9 targeting guide sequence portion
auaagauugaccaaaaacucag

SEQ ID NO: 7916 - RNA, 22 nt, Artificial Sequence
  SAMD9 targeting guide sequence portion
auugaccaaaaacucagggaaa

SEQ ID NO: 7917 - RNA, 22 nt, Artificial Sequence
  SAMD9 targeting guide sequence portion
auuucccugaguuuuuggucaa

SEQ ID NO: 7918 - RNA, 22 nt, Artificial Sequence
  SAMD9 targeting guide sequence portion
caaaaacucagggaaauuuuga

SEQ ID NO: 7919 - RNA, 22 nt, Artificial Sequence
  SAMD9 targeting guide sequence portion
caaaauuucccugaguuuuugg

SEQ ID NO: 7920 - RNA, 22 nt, Artificial Sequence
  SAMD9 targeting guide sequence portion
cagucaaaauuucccugaguuu

SEQ ID NO: 7921 - RNA, 22 nt, Artificial Sequence
  SAMD9 targeting guide sequence portion
cauaagauugaccaaaaacuca

SEQ ID NO: 7922 - RNA, 22 nt, Artificial Sequence
  SAMD9 targeting guide sequence portion
ccaaaaacucagggaaauuuug

SEQ ID NO: 7923 - RNA, 22 nt, Artificial Sequence
  SAMD9 targeting guide sequence portion
cccugaguuuuuggucaaucuu

SEQ ID NO: 7924 - RNA, 22 nt, Artificial Sequence
  SAMD9 targeting guide sequence portion
ccugaguuuuuggucaaucuua

SEQ ID NO: 7925 - RNA, 22 nt, Artificial Sequence
  SAMD9 targeting guide sequence portion
cucagggaaauuuugacugaac

SEQ ID NO: 7926 - RNA, 22 nt, Artificial Sequence
  SAMD9 targeting guide sequence portion
cugaguuuuuggucaaucuuau

SEQ ID NO: 7927 - RNA, 22 nt, Artificial Sequence
  SAMD9 targeting guide sequence portion
gaccaaaaacucagggaaauuu

SEQ ID NO: 7928 - RNA, 22 nt, Artificial Sequence
  SAMD9 targeting guide sequence portion
gaguuuuuggucaaucuuauga

SEQ ID NO: 7929 - RNA, 22 nt, Artificial Sequence
  SAMD9 targeting guide sequence portion
gauugaccaaaaacucagggaa

SEQ ID NO: 7930 - RNA, 22 nt, Artificial Sequence
  SAMD9 targeting guide sequence portion
gucaaaauuucccugaguuuuu

SEQ ID NO: 7931 - RNA, 22 nt, Artificial Sequence
  SAMD9 targeting guide sequence portion
gucauaagauugaccaaaaacu

SEQ ID NO: 7932 - RNA, 22 nt, Artificial Sequence
  SAMD9 targeting guide sequence portion
guucagucaaaauuucccugag

SEQ ID NO: 7933 - RNA, 22 nt, Artificial Sequence
  SAMD9 targeting guide sequence portion
uaagauugaccaaaaacucagg

SEQ ID NO: 7934 - RNA, 22 nt, Artificial Sequence
  SAMD9 targeting guide sequence portion
ucaaaauuucccugaguuuuug

SEQ ID NO: 7935 - RNA, 22 nt, Artificial Sequence
  SAMD9 targeting guide sequence portion
ucagggaaauuuugacugaaca

SEQ ID NO: 7936 - RNA, 22 nt, Artificial Sequence
  SAMD9 targeting guide sequence portion
ucagucaaaauuucccugaguu

SEQ ID NO: 7937 - RNA, 22 nt, Artificial Sequence
  SAMD9 targeting guide sequence portion
ucauaagauugaccaaaaacuc

SEQ ID NO: 7938 - RNA, 22 nt, Artificial Sequence
  SAMD9 targeting guide sequence portion
ucccugaguuuuuggucaaucu

SEQ ID NO: 7939 - RNA, 22 nt, Artificial Sequence
  SAMD9 targeting guide sequence portion
ugaccaaaaacucagggaaauu

SEQ ID NO: 7940 - RNA, 22 nt, Artificial Sequence
  SAMD9 targeting guide sequence portion
ugaguuuuuggucaaucuuaug

SEQ ID NO: 7941 - RNA, 22 nt, Artificial Sequence
  SAMD9 targeting guide sequence portion
uguucagucaaaauuucccuga

SEQ ID NO: 7942 - RNA, 22 nt, Artificial Sequence
  SAMD9 targeting guide sequence portion
uucagucaaaauuucccugagu

SEQ ID NO: 7943 - RNA, 22 nt, Artificial Sequence
  SAMD9 targeting guide sequence portion
uucccugaguuuuuggucaauc

SEQ ID NO: 7944 - RNA, 22 nt, Artificial Sequence
  SAMD9 targeting guide sequence portion
uugaccaaaaacucagggaaau

SEQ ID NO: 7945 - RNA, 22 nt, Artificial Sequence
  SAMD9 targeting guide sequence portion
uuucccugaguuuuuggucaau

SEQ ID NO: 7946 - RNA, 20 nt, Artificial Sequence
  SAMD9 targeting guide sequence portion
aacggcaaagcaacuuaacc

SEQ ID NO: 7947 - RNA, 20 nt, Artificial Sequence
  SAMD9 targeting guide sequence portion
aagguuaaguugcuuugccg

SEQ ID NO: 7948 - RNA, 20 nt, Artificial Sequence
  SAMD9 targeting guide sequence portion
aaguugcuuugccguucuga

SEQ ID NO: 7949 - RNA, 20 nt, Artificial Sequence
  SAMD9 targeting guide sequence portion
acauauagguaucagaacgg

SEQ ID NO: 7950 - RNA, 20 nt, Artificial Sequence
  SAMD9 targeting guide sequence portion
acggcaaagcaacuuaaccu

SEQ ID NO: 7951 - RNA, 20 nt, Artificial Sequence
  SAMD9 targeting guide sequence portion
agaacggcaaagcaacuuaa

SEQ ID NO: 7952 - RNA, 20 nt, Artificial Sequence
  SAMD9 targeting guide sequence portion
agguaucagaacggcaaagc

SEQ ID NO: 7953 - RNA, 20 nt, Artificial Sequence
  SAMD9 targeting guide sequence portion
agguuaaguugcuuugccgu

SEQ ID NO: 7954 - RNA, 20 nt, Artificial Sequence
  SAMD9 targeting guide sequence portion
aguugcuuugccguucugau

SEQ ID NO: 7955 - RNA, 20 nt, Artificial Sequence
  SAMD9 targeting guide sequence portion
auagguaucagaacggcaaa

SEQ ID NO: 7956 - RNA, 20 nt, Artificial Sequence
  SAMD9 targeting guide sequence portion
auauagguaucagaacggca

SEQ ID NO: 7957 - RNA, 20 nt, Artificial Sequence
  SAMD9 targeting guide sequence portion
aucagaacggcaaagcaacu

SEQ ID NO: 7958 - RNA, 20 nt, Artificial Sequence
  SAMD9 targeting guide sequence portion
cagaacggcaaagcaacuua

SEQ ID NO: 7959 - RNA, 20 nt, Artificial Sequence
  SAMD9 targeting guide sequence portion
cauauagguaucagaacggc

SEQ ID NO: 7960 - RNA, 20 nt, Artificial Sequence
  SAMD9 targeting guide sequence portion
ccguucugauaccuauaugu

SEQ ID NO: 7961 - RNA, 20 nt, Artificial Sequence
  SAMD9 targeting guide sequence portion
cggcaaagcaacuuaaccuu

SEQ ID NO: 7962 - RNA, 20 nt, Artificial Sequence
  SAMD9 targeting guide sequence portion
cguucugauaccuauaugua

SEQ ID NO: 7963 - RNA, 20 nt, Artificial Sequence
  SAMD9 targeting guide sequence portion
cuacauauagguaucagaac

SEQ ID NO: 7964 - RNA, 20 nt, Artificial Sequence
  SAMD9 targeting guide sequence portion
cuggaagguuaaguugcuuu

SEQ ID NO: 7965 - RNA, 20 nt, Artificial Sequence
  SAMD9 targeting guide sequence portion
cuuugccguucugauaccua

SEQ ID NO: 7966 - RNA, 20 nt, Artificial Sequence
  SAMD9 targeting guide sequence portion
cuuuuucuacauauagguau

SEQ ID NO: 7967 - RNA, 20 nt, Artificial Sequence
  SAMD9 targeting guide sequence portion
gaacggcaaagcaacuuaac

SEQ ID NO: 7968 - RNA, 20 nt, Artificial Sequence
  SAMD9 targeting guide sequence portion
gaagguuaaguugcuuugcc

SEQ ID NO: 7969 - RNA, 20 nt, Artificial Sequence
  SAMD9 targeting guide sequence portion
gccguucugauaccuauaug

SEQ ID NO: 7970 - RNA, 20 nt, Artificial Sequence
  SAMD9 targeting guide sequence portion
gcuuugccguucugauaccu

SEQ ID NO: 7971 - RNA, 20 nt, Artificial Sequence
  SAMD9 targeting guide sequence portion
ggaagguuaaguugcuuugc

SEQ ID NO: 7972 - RNA, 20 nt, Artificial Sequence
  SAMD9 targeting guide sequence portion
gguaucagaacggcaaagca

SEQ ID NO: 7973 - RNA, 20 nt, Artificial Sequence
  SAMD9 targeting guide sequence portion
gguuaaguugcuuugccguu

SEQ ID NO: 7974 - RNA, 20 nt, Artificial Sequence
  SAMD9 targeting guide sequence portion
guaucagaacggcaaagcaa

SEQ ID NO: 7975 - RNA, 20 nt, Artificial Sequence
  SAMD9 targeting guide sequence portion
guuaaguugcuuugccguuc

SEQ ID NO: 7976 - RNA, 20 nt, Artificial Sequence
  SAMD9 targeting guide sequence portion
guucugauaccuauauguag

SEQ ID NO: 7977 - RNA, 20 nt, Artificial Sequence
  SAMD9 targeting guide sequence portion
guugcuuugccguucugaua

SEQ ID NO: 7978 - RNA, 20 nt, Artificial Sequence
  SAMD9 targeting guide sequence portion
uaaguugcuuugccguucug

SEQ ID NO: 7979 - RNA, 20 nt, Artificial Sequence
  SAMD9 targeting guide sequence portion
uacauauagguaucagaacg

SEQ ID NO: 7980 - RNA, 20 nt, Artificial Sequence
  SAMD9 targeting guide sequence portion
uagguaucagaacggcaaag

SEQ ID NO: 7981 - RNA, 20 nt, Artificial Sequence
  SAMD9 targeting guide sequence portion
uauagguaucagaacggcaa

SEQ ID NO: 7982 - RNA, 20 nt, Artificial Sequence
  SAMD9 targeting guide sequence portion
uaucagaacggcaaagcaac

SEQ ID NO: 7983 - RNA, 20 nt, Artificial Sequence
  SAMD9 targeting guide sequence portion
ucagaacggcaaagcaacuu

SEQ ID NO: 7984 - RNA, 20 nt, Artificial Sequence
  SAMD9 targeting guide sequence portion
ucuacauauagguaucagaa

SEQ ID NO: 7985 - RNA, 20 nt, Artificial Sequence
  SAMD9 targeting guide sequence portion
ucuggaagguuaaguugcuu

SEQ ID NO: 7986 - RNA, 20 nt, Artificial Sequence
  SAMD9 targeting guide sequence portion
ugccguucugauaccuauau

SEQ ID NO: 7987 - RNA, 20 nt, Artificial Sequence
  SAMD9 targeting guide sequence portion
ugcuuugccguucugauacc

SEQ ID NO: 7988 - RNA, 20 nt, Artificial Sequence
  SAMD9 targeting guide sequence portion
uggaagguuaaguugcuuug

SEQ ID NO: 7989 - RNA, 20 nt, Artificial Sequence
  SAMD9 targeting guide sequence portion
uuaaguugcuuugccguucu

SEQ ID NO: 7990 - RNA, 20 nt, Artificial Sequence
  SAMD9 targeting guide sequence portion
uucuacauauagguaucaga

SEQ ID NO: 7991 - RNA, 20 nt, Artificial Sequence
  SAMD9 targeting guide sequence portion
uucuggaagguuaaguugcu

SEQ ID NO: 7992 - RNA, 20 nt, Artificial Sequence
  SAMD9 targeting guide sequence portion
uugccguucugauaccuaua

SEQ ID NO: 7993 - RNA, 20 nt, Artificial Sequence
  SAMD9 targeting guide sequence portion
uugcuuugccguucugauac

SEQ ID NO: 7994 - RNA, 20 nt, Artificial Sequence
  SAMD9 targeting guide sequence portion
uuucuacauauagguaucag

SEQ ID NO: 7995 - RNA, 20 nt, Artificial Sequence
  SAMD9 targeting guide sequence portion
uuugccguucugauaccuau

SEQ ID NO: 7996 - RNA, 20 nt, Artificial Sequence
  SAMD9 targeting guide sequence portion
uuuucuacauauagguauca

SEQ ID NO: 7997 - RNA, 20 nt, Artificial Sequence
  SAMD9 targeting guide sequence portion
uuuuucuacauauagguauc

SEQ ID NO: 7998 - RNA, 21 nt, Artificial Sequence
  SAMD9 targeting guide sequence portion
aacggcaaagcaacuuaaccu

SEQ ID NO: 7999 - RNA, 21 nt, Artificial Sequence
  SAMD9 targeting guide sequence portion
aagguuaaguugcuuugccgu

SEQ ID NO: 8000 - RNA, 21 nt, Artificial Sequence
  SAMD9 targeting guide sequence portion
aaguugcuuugccguucugau

SEQ ID NO: 8001 - RNA, 21 nt, Artificial Sequence
  SAMD9 targeting guide sequence portion
acauauagguaucagaacggc

SEQ ID NO: 8002 - RNA, 21 nt, Artificial Sequence
  SAMD9 targeting guide sequence portion
acggcaaagcaacuuaaccuu

SEQ ID NO: 8003 - RNA, 21 nt, Artificial Sequence
  SAMD9 targeting guide sequence portion
agaacggcaaagcaacuuaac

SEQ ID NO: 8004 - RNA, 21 nt, Artificial Sequence
  SAMD9 targeting guide sequence portion
agguaucagaacggcaaagca

SEQ ID NO: 8005 - RNA, 21 nt, Artificial Sequence
  SAMD9 targeting guide sequence portion
agguuaaguugcuuugccguu

SEQ ID NO: 8006 - RNA, 21 nt, Artificial Sequence
  SAMD9 targeting guide sequence portion
aguugcuuugccguucugaua

SEQ ID NO: 8007 - RNA, 21 nt, Artificial Sequence
  SAMD9 targeting guide sequence portion
auagguaucagaacggcaaag

SEQ ID NO: 8008 - RNA, 21 nt, Artificial Sequence
  SAMD9 targeting guide sequence portion
auauagguaucagaacggcaa

SEQ ID NO: 8009 - RNA, 21 nt, Artificial Sequence
  SAMD9 targeting guide sequence portion
aucagaacggcaaagcaacuu

SEQ ID NO: 8010 - RNA, 21 nt, Artificial Sequence
  SAMD9 targeting guide sequence portion
cagaacggcaaagcaacuuaa

SEQ ID NO: 8011 - RNA, 21 nt, Artificial Sequence
  SAMD9 targeting guide sequence portion
cauauagguaucagaacggca

SEQ ID NO: 8012 - RNA, 21 nt, Artificial Sequence
  SAMD9 targeting guide sequence portion
ccguucugauaccuauaugua

SEQ ID NO: 8013 - RNA, 21 nt, Artificial Sequence
  SAMD9 targeting guide sequence portion
cggcaaagcaacuuaaccuuc

SEQ ID NO: 8014 - RNA, 21 nt, Artificial Sequence
  SAMD9 targeting guide sequence portion
cguucugauaccuauauguag

SEQ ID NO: 8015 - RNA, 21 nt, Artificial Sequence
  SAMD9 targeting guide sequence portion
cuacauauagguaucagaacg

SEQ ID NO: 8016 - RNA, 21 nt, Artificial Sequence
  SAMD9 targeting guide sequence portion
cuggaagguuaaguugcuuug

SEQ ID NO: 8017 - RNA, 21 nt, Artificial Sequence
  SAMD9 targeting guide sequence portion
cuuugccguucugauaccuau

SEQ ID NO: 8018 - RNA, 21 nt, Artificial Sequence
  SAMD9 targeting guide sequence portion
cuuuuucuacauauagguauc

SEQ ID NO: 8019 - RNA, 21 nt, Artificial Sequence
  SAMD9 targeting guide sequence portion
gaacggcaaagcaacuuaacc

SEQ ID NO: 8020 - RNA, 21 nt, Artificial Sequence
  SAMD9 targeting guide sequence portion
gaagguuaaguugcuuugccg

SEQ ID NO: 8021 - RNA, 21 nt, Artificial Sequence
  SAMD9 targeting guide sequence portion
gccguucugauaccuauaugu

SEQ ID NO: 8022 - RNA, 21 nt, Artificial Sequence
  SAMD9 targeting guide sequence portion
gcuuugccguucugauaccua

SEQ ID NO: 8023 - RNA, 21 nt, Artificial Sequence
  SAMD9 targeting guide sequence portion
ggaagguuaaguugcuuugcc

SEQ ID NO: 8024 - RNA, 21 nt, Artificial Sequence
  SAMD9 targeting guide sequence portion
gguaucagaacggcaaagcaa

SEQ ID NO: 8025 - RNA, 21 nt, Artificial Sequence
  SAMD9 targeting guide sequence portion
gguuaaguugcuuugccguuc

SEQ ID NO: 8026 - RNA, 21 nt, Artificial Sequence
  SAMD9 targeting guide sequence portion
guaucagaacggcaaagcaac

SEQ ID NO: 8027 - RNA, 21 nt, Artificial Sequence
  SAMD9 targeting guide sequence portion
guuaaguugcuuugccguucu

SEQ ID NO: 8028 - RNA, 21 nt, Artificial Sequence
  SAMD9 targeting guide sequence portion
guucugauaccuauauguaga

SEQ ID NO: 8029 - RNA, 21 nt, Artificial Sequence
  SAMD9 targeting guide sequence portion
guugcuuugccguucugauac

SEQ ID NO: 8030 - RNA, 21 nt, Artificial Sequence
  SAMD9 targeting guide sequence portion
uaaguugcuuugccguucuga

SEQ ID NO: 8031 - RNA, 21 nt, Artificial Sequence
  SAMD9 targeting guide sequence portion
uacauauagguaucagaacgg

SEQ ID NO: 8032 - RNA, 21 nt, Artificial Sequence
  SAMD9 targeting guide sequence portion
uagguaucagaacggcaaagc

SEQ ID NO: 8033 - RNA, 21 nt, Artificial Sequence
  SAMD9 targeting guide sequence portion
uauagguaucagaacggcaaa

SEQ ID NO: 8034 - RNA, 21 nt, Artificial Sequence
  SAMD9 targeting guide sequence portion
uaucagaacggcaaagcaacu

SEQ ID NO: 8035 - RNA, 21 nt, Artificial Sequence
  SAMD9 targeting guide sequence portion
ucagaacggcaaagcaacuua

SEQ ID NO: 8036 - RNA, 21 nt, Artificial Sequence
  SAMD9 targeting guide sequence portion
ucuacauauagguaucagaac

SEQ ID NO: 8037 - RNA, 21 nt, Artificial Sequence
  SAMD9 targeting guide sequence portion
ucuggaagguuaaguugcuuu

SEQ ID NO: 8038 - RNA, 21 nt, Artificial Sequence
  SAMD9 targeting guide sequence portion
ucuuuuucuacauauagguau

SEQ ID NO: 8039 - RNA, 21 nt, Artificial Sequence
  SAMD9 targeting guide sequence portion
ugccguucugauaccuauaug

SEQ ID NO: 8040 - RNA, 21 nt, Artificial Sequence
  SAMD9 targeting guide sequence portion
ugcuuugccguucugauaccu

SEQ ID NO: 8041 - RNA, 21 nt, Artificial Sequence
  SAMD9 targeting guide sequence portion
uggaagguuaaguugcuuugc

SEQ ID NO: 8042 - RNA, 21 nt, Artificial Sequence
  SAMD9 targeting guide sequence portion
uuaaguugcuuugccguucug

SEQ ID NO: 8043 - RNA, 21 nt, Artificial Sequence
  SAMD9 targeting guide sequence portion
uucuacauauagguaucagaa

SEQ ID NO: 8044 - RNA, 21 nt, Artificial Sequence
  SAMD9 targeting guide sequence portion
uucuggaagguuaaguugcuu

SEQ ID NO: 8045 - RNA, 21 nt, Artificial Sequence
  SAMD9 targeting guide sequence portion
uugccguucugauaccuauau

SEQ ID NO: 8046 - RNA, 21 nt, Artificial Sequence
  SAMD9 targeting guide sequence portion
uugcuuugccguucugauacc

SEQ ID NO: 8047 - RNA, 21 nt, Artificial Sequence
  SAMD9 targeting guide sequence portion
uuucuacauauagguaucaga

SEQ ID NO: 8048 - RNA, 21 nt, Artificial Sequence
  SAMD9 targeting guide sequence portion
uuucuggaagguuaaguugcu

SEQ ID NO: 8049 - RNA, 21 nt, Artificial Sequence
  SAMD9 targeting guide sequence portion
uuugccguucugauaccuaua

SEQ ID NO: 8050 - RNA, 21 nt, Artificial Sequence
  SAMD9 targeting guide sequence portion
uuuucuacauauagguaucag

SEQ ID NO: 8051 - RNA, 21 nt, Artificial Sequence
  SAMD9 targeting guide sequence portion
uuuuucuacauauagguauca

SEQ ID NO: 8052 - RNA, 22 nt, Artificial Sequence
  SAMD9 targeting guide sequence portion
aacggcaaagcaacuuaaccuu

SEQ ID NO: 8053 - RNA, 22 nt, Artificial Sequence
  SAMD9 targeting guide sequence portion
aagguuaaguugcuuugccguu

SEQ ID NO: 8054 - RNA, 22 nt, Artificial Sequence
  SAMD9 targeting guide sequence portion
aaguugcuuugccguucugaua

SEQ ID NO: 8055 - RNA, 22 nt, Artificial Sequence
  SAMD9 targeting guide sequence portion
acauauagguaucagaacggca

SEQ ID NO: 8056 - RNA, 22 nt, Artificial Sequence
  SAMD9 targeting guide sequence portion
acggcaaagcaacuuaaccuuc

SEQ ID NO: 8057 - RNA, 22 nt, Artificial Sequence
  SAMD9 targeting guide sequence portion
agaacggcaaagcaacuuaacc

SEQ ID NO: 8058 - RNA, 22 nt, Artificial Sequence
  SAMD9 targeting guide sequence portion
agguaucagaacggcaaagcaa

SEQ ID NO: 8059 - RNA, 22 nt, Artificial Sequence
  SAMD9 targeting guide sequence portion
agguuaaguugcuuugccguuc

SEQ ID NO: 8060 - RNA, 22 nt, Artificial Sequence
  SAMD9 targeting guide sequence portion
aguugcuuugccguucugauac

SEQ ID NO: 8061 - RNA, 22 nt, Artificial Sequence
  SAMD9 targeting guide sequence portion
auagguaucagaacggcaaagc

SEQ ID NO: 8062 - RNA, 22 nt, Artificial Sequence
  SAMD9 targeting guide sequence portion
auauagguaucagaacggcaaa

SEQ ID NO: 8063 - RNA, 22 nt, Artificial Sequence
  SAMD9 targeting guide sequence portion
aucagaacggcaaagcaacuua

SEQ ID NO: 8064 - RNA, 22 nt, Artificial Sequence
  SAMD9 targeting guide sequence portion
cagaacggcaaagcaacuuaac

SEQ ID NO: 8065 - RNA, 22 nt, Artificial Sequence
  SAMD9 targeting guide sequence portion
cauauagguaucagaacggcaa

SEQ ID NO: 8066 - RNA, 22 nt, Artificial Sequence
  SAMD9 targeting guide sequence portion
ccguucugauaccuauauguag

SEQ ID NO: 8067 - RNA, 22 nt, Artificial Sequence
  SAMD9 targeting guide sequence portion
cggcaaagcaacuuaaccuucc

SEQ ID NO: 8068 - RNA, 22 nt, Artificial Sequence
  SAMD9 targeting guide sequence portion
cguucugauaccuauauguaga

SEQ ID NO: 8069 - RNA, 22 nt, Artificial Sequence
  SAMD9 targeting guide sequence portion
cuacauauagguaucagaacgg

SEQ ID NO: 8070 - RNA, 22 nt, Artificial Sequence
  SAMD9 targeting guide sequence portion
cuggaagguuaaguugcuuugc

SEQ ID NO: 8071 - RNA, 22 nt, Artificial Sequence
  SAMD9 targeting guide sequence portion
cuuugccguucugauaccuaua

SEQ ID NO: 8072 - RNA, 22 nt, Artificial Sequence
  SAMD9 targeting guide sequence portion
cuuuuucuacauauagguauca

SEQ ID NO: 8073 - RNA, 22 nt, Artificial Sequence
  SAMD9 targeting guide sequence portion
gaacggcaaagcaacuuaaccu

SEQ ID NO: 8074 - RNA, 22 nt, Artificial Sequence
  SAMD9 targeting guide sequence portion
gaagguuaaguugcuuugccgu

SEQ ID NO: 8075 - RNA, 22 nt, Artificial Sequence
  SAMD9 targeting guide sequence portion
gccguucugauaccuauaugua

SEQ ID NO: 8076 - RNA, 22 nt, Artificial Sequence
  SAMD9 targeting guide sequence portion
gcuuugccguucugauaccuau

SEQ ID NO: 8077 - RNA, 22 nt, Artificial Sequence
  SAMD9 targeting guide sequence portion
ggaagguuaaguugcuuugccg

SEQ ID NO: 8078 - RNA, 22 nt, Artificial Sequence
  SAMD9 targeting guide sequence portion
gguaucagaacggcaaagcaac

SEQ ID NO: 8079 - RNA, 22 nt, Artificial Sequence
  SAMD9 targeting guide sequence portion
gguuaaguugcuuugccguucu

SEQ ID NO: 8080 - RNA, 22 nt, Artificial Sequence
  SAMD9 targeting guide sequence portion
guaucagaacggcaaagcaacu

SEQ ID NO: 8081 - RNA, 22 nt, Artificial Sequence
  SAMD9 targeting guide sequence portion
guuaaguugcuuugccguucug

SEQ ID NO: 8082 - RNA, 22 nt, Artificial Sequence
  SAMD9 targeting guide sequence portion
guucugauaccuauauguagaa

SEQ ID NO: 8083 - RNA, 22 nt, Artificial Sequence
  SAMD9 targeting guide sequence portion
guugcuuugccguucugauacc

SEQ ID NO: 8084 - RNA, 22 nt, Artificial Sequence
  SAMD9 targeting guide sequence portion
uaaguugcuuugccguucugau

SEQ ID NO: 8085 - RNA, 22 nt, Artificial Sequence
  SAMD9 targeting guide sequence portion
uacauauagguaucagaacggc

SEQ ID NO: 8086 - RNA, 22 nt, Artificial Sequence
  SAMD9 targeting guide sequence portion
uagguaucagaacggcaaagca

SEQ ID NO: 8087 - RNA, 22 nt, Artificial Sequence
  SAMD9 targeting guide sequence portion
uauagguaucagaacggcaaag

SEQ ID NO: 8088 - RNA, 22 nt, Artificial Sequence
  SAMD9 targeting guide sequence portion
uaucagaacggcaaagcaacuu

SEQ ID NO: 8089 - RNA, 22 nt, Artificial Sequence
  SAMD9 targeting guide sequence portion
ucagaacggcaaagcaacuuaa

SEQ ID NO: 8090 - RNA, 22 nt, Artificial Sequence
  SAMD9 targeting guide sequence portion
ucuacauauagguaucagaacg

SEQ ID NO: 8091 - RNA, 22 nt, Artificial Sequence
  SAMD9 targeting guide sequence portion
ucuggaagguuaaguugcuuug

SEQ ID NO: 8092 - RNA, 22 nt, Artificial Sequence
  SAMD9 targeting guide sequence portion
ucuuuuucuacauauagguauc

SEQ ID NO: 8093 - RNA, 22 nt, Artificial Sequence
  SAMD9 targeting guide sequence portion
ugccguucugauaccuauaugu

SEQ ID NO: 8094 - RNA, 22 nt, Artificial Sequence
  SAMD9 targeting guide sequence portion
ugcuuugccguucugauaccua

SEQ ID NO: 8095 - RNA, 22 nt, Artificial Sequence
  SAMD9 targeting guide sequence portion
uggaagguuaaguugcuuugcc

SEQ ID NO: 8096 - RNA, 22 nt, Artificial Sequence
  SAMD9 targeting guide sequence portion
uuaaguugcuuugccguucuga

SEQ ID NO: 8097 - RNA, 22 nt, Artificial Sequence
  SAMD9 targeting guide sequence portion
uucuacauauagguaucagaac

SEQ ID NO: 8098 - RNA, 22 nt, Artificial Sequence
  SAMD9 targeting guide sequence portion
uucuggaagguuaaguugcuuu

SEQ ID NO: 8099 - RNA, 22 nt, Artificial Sequence
  SAMD9 targeting guide sequence portion
uucuuuuucuacauauagguau

SEQ ID NO: 8100 - RNA, 22 nt, Artificial Sequence
  SAMD9 targeting guide sequence portion
uugccguucugauaccuauaug

SEQ ID NO: 8101 - RNA, 22 nt, Artificial Sequence
  SAMD9 targeting guide sequence portion
uugcuuugccguucugauaccu

SEQ ID NO: 8102 - RNA, 22 nt, Artificial Sequence
  SAMD9 targeting guide sequence portion
uuucuacauauagguaucagaa

SEQ ID NO: 8103 - RNA, 22 nt, Artificial Sequence
  SAMD9 targeting guide sequence portion
uuucuggaagguuaaguugcuu

SEQ ID NO: 8104 - RNA, 22 nt, Artificial Sequence
  SAMD9 targeting guide sequence portion
uuugccguucugauaccuauau

SEQ ID NO: 8105 - RNA, 22 nt, Artificial Sequence
  SAMD9 targeting guide sequence portion
uuuucuacauauagguaucaga

SEQ ID NO: 8106 - RNA, 22 nt, Artificial Sequence
  SAMD9 targeting guide sequence portion
uuuucuggaagguuaaguugcu

SEQ ID NO: 8107 - RNA, 22 nt, Artificial Sequence
  SAMD9 targeting guide sequence portion
uuuuucuacauauagguaucag

SEQ ID NO: 8108 - RNA, 20 nt, Artificial Sequence
  SAMD9 targeting guide sequence portion
aaaaaagaguucauauacac

SEQ ID NO: 8109 - RNA, 20 nt, Artificial Sequence
  SAMD9 targeting guide sequence portion
aaaaagaguucauauacacu

SEQ ID NO: 8110 - RNA, 20 nt, Artificial Sequence
  SAMD9 targeting guide sequence portion
aaaagaguucauauacacug

SEQ ID NO: 8111 - RNA, 20 nt, Artificial Sequence
  SAMD9 targeting guide sequence portion
aaagaguucauauacacuga

SEQ ID NO: 8112 - RNA, 20 nt, Artificial Sequence
  SAMD9 targeting guide sequence portion
aagaguucauauacacugaa

SEQ ID NO: 8113 - RNA, 20 nt, Artificial Sequence
  SAMD9 targeting guide sequence portion
aauuauuucaguguauauga

SEQ ID NO: 8114 - RNA, 20 nt, Artificial Sequence
  SAMD9 targeting guide sequence portion
agaguucauauacacugaaa

SEQ ID NO: 8115 - RNA, 20 nt, Artificial Sequence
  SAMD9 targeting guide sequence portion
aguguauaugaacucuuuuu

SEQ ID NO: 8116 - RNA, 20 nt, Artificial Sequence
  SAMD9 targeting guide sequence portion
auuauuucaguguauaugaa

SEQ ID NO: 8117 - RNA, 20 nt, Artificial Sequence
  SAMD9 targeting guide sequence portion
auuucaguguauaugaacuc

SEQ ID NO: 8118 - RNA, 20 nt, Artificial Sequence
  SAMD9 targeting guide sequence portion
caguguauaugaacucuuuu

SEQ ID NO: 8119 - RNA, 20 nt, Artificial Sequence
  SAMD9 targeting guide sequence portion
cuuaaaaugugcuuaaaaaa

SEQ ID NO: 8120 - RNA, 20 nt, Artificial Sequence
  SAMD9 targeting guide sequence portion
gaguucauauacacugaaau

SEQ ID NO: 8121 - RNA, 20 nt, Artificial Sequence
  SAMD9 targeting guide sequence portion
guguauaugaacucuuuuuu

SEQ ID NO: 8122 - RNA, 20 nt, Artificial Sequence
  SAMD9 targeting guide sequence portion
uaauuauuucaguguauaug

SEQ ID NO: 8123 - RNA, 20 nt, Artificial Sequence
  SAMD9 targeting guide sequence portion
uauuucaguguauaugaacu

SEQ ID NO: 8124 - RNA, 20 nt, Artificial Sequence
  SAMD9 targeting guide sequence portion
ucaguguauaugaacucuuu

SEQ ID NO: 8125 - RNA, 20 nt, Artificial Sequence
  SAMD9 targeting guide sequence portion
uuauuucaguguauaugaac

SEQ ID NO: 8126 - RNA, 20 nt, Artificial Sequence
  SAMD9 targeting guide sequence portion
uucaguguauaugaacucuu

SEQ ID NO: 8127 - RNA, 20 nt, Artificial Sequence
  SAMD9 targeting guide sequence portion
uuucaguguauaugaacucu

SEQ ID NO: 8128 - RNA, 21 nt, Artificial Sequence
  SAMD9 targeting guide sequence portion
aaaaaagaguucauauacacu

SEQ ID NO: 8129 - RNA, 21 nt, Artificial Sequence
  SAMD9 targeting guide sequence portion
aaaaagaguucauauacacug

SEQ ID NO: 8130 - RNA, 21 nt, Artificial Sequence
  SAMD9 targeting guide sequence portion
aaaagaguucauauacacuga

SEQ ID NO: 8131 - RNA, 21 nt, Artificial Sequence
  SAMD9 targeting guide sequence portion
aaagaguucauauacacugaa

SEQ ID NO: 8132 - RNA, 21 nt, Artificial Sequence
  SAMD9 targeting guide sequence portion
aagaguucauauacacugaaa

SEQ ID NO: 8133 - RNA, 21 nt, Artificial Sequence
  SAMD9 targeting guide sequence portion
agaguucauauacacugaaau

SEQ ID NO: 8134 - RNA, 21 nt, Artificial Sequence
  SAMD9 targeting guide sequence portion
aguguauaugaacucuuuuuu

SEQ ID NO: 8135 - RNA, 21 nt, Artificial Sequence
  SAMD9 targeting guide sequence portion
auuauuucaguguauaugaac

SEQ ID NO: 8136 - RNA, 21 nt, Artificial Sequence
  SAMD9 targeting guide sequence portion
auuucaguguauaugaacucu

SEQ ID NO: 8137 - RNA, 21 nt, Artificial Sequence
  SAMD9 targeting guide sequence portion
caguguauaugaacucuuuuu

SEQ ID NO: 8138 - RNA, 21 nt, Artificial Sequence
  SAMD9 targeting guide sequence portion
gaguucauauacacugaaaua

SEQ ID NO: 8139 - RNA, 21 nt, Artificial Sequence
  SAMD9 targeting guide sequence portion
uauuucaguguauaugaacuc

SEQ ID NO: 8140 - RNA, 21 nt, Artificial Sequence
  SAMD9 targeting guide sequence portion
ucaguguauaugaacucuuuu

SEQ ID NO: 8141 - RNA, 21 nt, Artificial Sequence
  SAMD9 targeting guide sequence portion
uuauuucaguguauaugaacu

SEQ ID NO: 8142 - RNA, 21 nt, Artificial Sequence
  SAMD9 targeting guide sequence portion
uucaguguauaugaacucuuu

SEQ ID NO: 8143 - RNA, 21 nt, Artificial Sequence
  SAMD9 targeting guide sequence portion
uuucaguguauaugaacucuu

SEQ ID NO: 8144 - RNA, 22 nt, Artificial Sequence
  SAMD9 targeting guide sequence portion
aaaaaagaguucauauacacug

SEQ ID NO: 8145 - RNA, 22 nt, Artificial Sequence
  SAMD9 targeting guide sequence portion
aaaaagaguucauauacacuga

SEQ ID NO: 8146 - RNA, 22 nt, Artificial Sequence
  SAMD9 targeting guide sequence portion
aaaagaguucauauacacugaa

SEQ ID NO: 8147 - RNA, 22 nt, Artificial Sequence
  SAMD9 targeting guide sequence portion
aaagaguucauauacacugaaa

SEQ ID NO: 8148 - RNA, 22 nt, Artificial Sequence
  SAMD9 targeting guide sequence portion
aagaguucauauacacugaaau

SEQ ID NO: 8149 - RNA, 22 nt, Artificial Sequence
  SAMD9 targeting guide sequence portion
aauuauuucaguguauaugaac

SEQ ID NO: 8150 - RNA, 22 nt, Artificial Sequence
  SAMD9 targeting guide sequence portion
agaguucauauacacugaaaua

SEQ ID NO: 8151 - RNA, 22 nt, Artificial Sequence
  SAMD9 targeting guide sequence portion
auuauuucaguguauaugaacu

SEQ ID NO: 8152 - RNA, 22 nt, Artificial Sequence
  SAMD9 targeting guide sequence portion
auuucaguguauaugaacucuu

SEQ ID NO: 8153 - RNA, 22 nt, Artificial Sequence
  SAMD9 targeting guide sequence portion
caguguauaugaacucuuuuuu

SEQ ID NO: 8154 - RNA, 22 nt, Artificial Sequence
  SAMD9 targeting guide sequence portion
gaguucauauacacugaaauaa

SEQ ID NO: 8155 - RNA, 22 nt, Artificial Sequence
  SAMD9 targeting guide sequence portion
uauuucaguguauaugaacucu

SEQ ID NO: 8156 - RNA, 22 nt, Artificial Sequence
  SAMD9 targeting guide sequence portion
ucaguguauaugaacucuuuuu

SEQ ID NO: 8157 - RNA, 22 nt, Artificial Sequence
  SAMD9 targeting guide sequence portion
uuauuucaguguauaugaacuc

SEQ ID NO: 8158 - RNA, 22 nt, Artificial Sequence
  SAMD9 targeting guide sequence portion
uucaguguauaugaacucuuuu

SEQ ID NO: 8159 - RNA, 22 nt, Artificial Sequence
  SAMD9 targeting guide sequence portion
uuucaguguauaugaacucuuu

SEQ ID NO: 8160 - RNA, 20 nt, Artificial Sequence
  SAMD9 targeting guide sequence portion
acuuaaaaugugcuuaaaaa

SEQ ID NO: 8161 - RNA, 22 nt, Artificial Sequence
  SAMD9 targeting guide sequence portion
caacuuaaaaugugcuuaaaaa

SEQ ID NO: 8162 - RNA, 20 nt, Artificial Sequence
  SAMD9 targeting guide sequence portion
aaaaagcucucagaaaguaa

SEQ ID NO: 8163 - RNA, 20 nt, Artificial Sequence
  SAMD9 targeting guide sequence portion
aaaagcucucagaaaguaau

SEQ ID NO: 8164 - RNA, 20 nt, Artificial Sequence
  SAMD9 targeting guide sequence portion
aaagcucucagaaaguaaua

SEQ ID NO: 8165 - RNA, 20 nt, Artificial Sequence
  SAMD9 targeting guide sequence portion
aaaguaauaccagagugaag

SEQ ID NO: 8166 - RNA, 20 nt, Artificial Sequence
  SAMD9 targeting guide sequence portion
aaauaagucaaauaaucuuc

SEQ ID NO: 8167 - RNA, 20 nt, Artificial Sequence
  SAMD9 targeting guide sequence portion
aaauaaucuucacucuggua

SEQ ID NO: 8168 - RNA, 20 nt, Artificial Sequence
  SAMD9 targeting guide sequence portion
aagcucucagaaaguaauac

SEQ ID NO: 8169 - RNA, 20 nt, Artificial Sequence
  SAMD9 targeting guide sequence portion
aaguaauaccagagugaaga

SEQ ID NO: 8170 - RNA, 20 nt, Artificial Sequence
  SAMD9 targeting guide sequence portion
aagucaaauaaucuucacuc

SEQ ID NO: 8171 - RNA, 20 nt, Artificial Sequence
  SAMD9 targeting guide sequence portion
aauaagucaaauaaucuuca

SEQ ID NO: 8172 - RNA, 20 nt, Artificial Sequence
  SAMD9 targeting guide sequence portion
aauaaucuucacucugguau

SEQ ID NO: 8173 - RNA, 20 nt, Artificial Sequence
  SAMD9 targeting guide sequence portion
aauaccagagugaagauuau

SEQ ID NO: 8174 - RNA, 20 nt, Artificial Sequence
  SAMD9 targeting guide sequence portion
aaucuucacucugguauuac

SEQ ID NO: 8175 - RNA, 20 nt, Artificial Sequence
  SAMD9 targeting guide sequence portion
accagagugaagauuauuug

SEQ ID NO: 8176 - RNA, 20 nt, Artificial Sequence
  SAMD9 targeting guide sequence portion
acucugguauuacuuucuga

SEQ ID NO: 8177 - RNA, 20 nt, Artificial Sequence
  SAMD9 targeting guide sequence portion
agaaaguaauaccagaguga

SEQ ID NO: 8178 - RNA, 20 nt, Artificial Sequence
  SAMD9 targeting guide sequence portion
agaaauaagucaaauaaucu

SEQ ID NO: 8179 - RNA, 20 nt, Artificial Sequence
  SAMD9 targeting guide sequence portion
agagugaagauuauuugacu

SEQ ID NO: 8180 - RNA, 20 nt, Artificial Sequence
  SAMD9 targeting guide sequence portion
agcucucagaaaguaauacc

SEQ ID NO: 8181 - RNA, 20 nt, Artificial Sequence
  SAMD9 targeting guide sequence portion
aguaauaccagagugaagau

SEQ ID NO: 8182 - RNA, 20 nt, Artificial Sequence
  SAMD9 targeting guide sequence portion
agucaaauaaucuucacucu

SEQ ID NO: 8183 - RNA, 20 nt, Artificial Sequence
  SAMD9 targeting guide sequence portion
auaagucaaauaaucuucac

SEQ ID NO: 8184 - RNA, 20 nt, Artificial Sequence
  SAMD9 targeting guide sequence portion
auaaucuucacucugguauu

SEQ ID NO: 8185 - RNA, 20 nt, Artificial Sequence
  SAMD9 targeting guide sequence portion
auaccagagugaagauuauu

SEQ ID NO: 8186 - RNA, 20 nt, Artificial Sequence
  SAMD9 targeting guide sequence portion
aucuucacucugguauuacu

SEQ ID NO: 8187 - RNA, 20 nt, Artificial Sequence
  SAMD9 targeting guide sequence portion
caaauaaucuucacucuggu

SEQ ID NO: 8188 - RNA, 20 nt, Artificial Sequence
  SAMD9 targeting guide sequence portion
cacucugguauuacuuucug

SEQ ID NO: 8189 - RNA, 20 nt, Artificial Sequence
  SAMD9 targeting guide sequence portion
cagaaaguaauaccagagug

SEQ ID NO: 8190 - RNA, 20 nt, Artificial Sequence
  SAMD9 targeting guide sequence portion
cagagugaagauuauuugac

SEQ ID NO: 8191 - RNA, 20 nt, Artificial Sequence
  SAMD9 targeting guide sequence portion
ccagagugaagauuauuuga

SEQ ID NO: 8192 - RNA, 20 nt, Artificial Sequence
  SAMD9 targeting guide sequence portion
cucagaaaguaauaccagag

SEQ ID NO: 8193 - RNA, 20 nt, Artificial Sequence
  SAMD9 targeting guide sequence portion
cucucagaaaguaauaccag

SEQ ID NO: 8194 - RNA, 20 nt, Artificial Sequence
  SAMD9 targeting guide sequence portion
cucugguauuacuuucugag

SEQ ID NO: 8195 - RNA, 20 nt, Artificial Sequence
  SAMD9 targeting guide sequence portion
cugguauuacuuucugagag

SEQ ID NO: 8196 - RNA, 20 nt, Artificial Sequence
  SAMD9 targeting guide sequence portion
cuucacucugguauuacuuu

SEQ ID NO: 8197 - RNA, 20 nt, Artificial Sequence
  SAMD9 targeting guide sequence portion
gaaaguaauaccagagugaa

SEQ ID NO: 8198 - RNA, 20 nt, Artificial Sequence
  SAMD9 targeting guide sequence portion
gaaauaagucaaauaaucuu

SEQ ID NO: 8199 - RNA, 20 nt, Artificial Sequence
  SAMD9 targeting guide sequence portion
gagugaagauuauuugacuu

SEQ ID NO: 8200 - RNA, 20 nt, Artificial Sequence
  SAMD9 targeting guide sequence portion
gcucucagaaaguaauacca

SEQ ID NO: 8201 - RNA, 20 nt, Artificial Sequence
  SAMD9 targeting guide sequence portion
guaauaccagagugaagauu

SEQ ID NO: 8202 - RNA, 20 nt, Artificial Sequence
  SAMD9 targeting guide sequence portion
gucaaauaaucuucacucug

SEQ ID NO: 8203 - RNA, 20 nt, Artificial Sequence
  SAMD9 targeting guide sequence portion
uaagucaaauaaucuucacu

SEQ ID NO: 8204 - RNA, 20 nt, Artificial Sequence
  SAMD9 targeting guide sequence portion
uaauaccagagugaagauua

SEQ ID NO: 8205 - RNA, 20 nt, Artificial Sequence
  SAMD9 targeting guide sequence portion
uaaucuucacucugguauua

SEQ ID NO: 8206 - RNA, 20 nt, Artificial Sequence
  SAMD9 targeting guide sequence portion
uaccagagugaagauuauuu

SEQ ID NO: 8207 - RNA, 20 nt, Artificial Sequence
  SAMD9 targeting guide sequence portion
ucaaauaaucuucacucugg

SEQ ID NO: 8208 - RNA, 20 nt, Artificial Sequence
  SAMD9 targeting guide sequence portion
ucacucugguauuacuuucu

SEQ ID NO: 8209 - RNA, 20 nt, Artificial Sequence
  SAMD9 targeting guide sequence portion
ucagaaaguaauaccagagu

SEQ ID NO: 8210 - RNA, 20 nt, Artificial Sequence
  SAMD9 targeting guide sequence portion
ucucagaaaguaauaccaga

SEQ ID NO: 8211 - RNA, 20 nt, Artificial Sequence
  SAMD9 targeting guide sequence portion
ucugguauuacuuucugaga

SEQ ID NO: 8212 - RNA, 20 nt, Artificial Sequence
  SAMD9 targeting guide sequence portion
ucuucacucugguauuacuu

SEQ ID NO: 8213 - RNA, 20 nt, Artificial Sequence
  SAMD9 targeting guide sequence portion
uucacucugguauuacuuuc

SEQ ID NO: 8214 - RNA, 21 nt, Artificial Sequence
  SAMD9 targeting guide sequence portion
aaaaaagcucucagaaaguaa

SEQ ID NO: 8215 - RNA, 21 nt, Artificial Sequence
  SAMD9 targeting guide sequence portion
aaaaagcucucagaaaguaau

SEQ ID NO: 8216 - RNA, 21 nt, Artificial Sequence
  SAMD9 targeting guide sequence portion
aaaagcucucagaaaguaaua

SEQ ID NO: 8217 - RNA, 21 nt, Artificial Sequence
  SAMD9 targeting guide sequence portion
aaagcucucagaaaguaauac

SEQ ID NO: 8218 - RNA, 21 nt, Artificial Sequence
  SAMD9 targeting guide sequence portion
aaaguaauaccagagugaaga

SEQ ID NO: 8219 - RNA, 21 nt, Artificial Sequence
  SAMD9 targeting guide sequence portion
aaauaaucuucacucugguau

SEQ ID NO: 8220 - RNA, 21 nt, Artificial Sequence
  SAMD9 targeting guide sequence portion
aagcucucagaaaguaauacc

SEQ ID NO: 8221 - RNA, 21 nt, Artificial Sequence
  SAMD9 targeting guide sequence portion
aaguaauaccagagugaagau

SEQ ID NO: 8222 - RNA, 21 nt, Artificial Sequence
  SAMD9 targeting guide sequence portion
aagucaaauaaucuucacucu

SEQ ID NO: 8223 - RNA, 21 nt, Artificial Sequence
  SAMD9 targeting guide sequence portion
aauaagucaaauaaucuucac

SEQ ID NO: 8224 - RNA, 21 nt, Artificial Sequence
  SAMD9 targeting guide sequence portion
aauaaucuucacucugguauu

SEQ ID NO: 8225 - RNA, 21 nt, Artificial Sequence
  SAMD9 targeting guide sequence portion
aauaccagagugaagauuauu

SEQ ID NO: 8226 - RNA, 21 nt, Artificial Sequence
  SAMD9 targeting guide sequence portion
aaucuucacucugguauuacu

SEQ ID NO: 8227 - RNA, 21 nt, Artificial Sequence
  SAMD9 targeting guide sequence portion
accagagugaagauuauuuga

SEQ ID NO: 8228 - RNA, 21 nt, Artificial Sequence
  SAMD9 targeting guide sequence portion
acucugguauuacuuucugag

SEQ ID NO: 8229 - RNA, 21 nt, Artificial Sequence
  SAMD9 targeting guide sequence portion
agaaaguaauaccagagugaa

SEQ ID NO: 8230 - RNA, 21 nt, Artificial Sequence
  SAMD9 targeting guide sequence portion
agagugaagauuauuugacuu

SEQ ID NO: 8231 - RNA, 21 nt, Artificial Sequence
  SAMD9 targeting guide sequence portion
agcucucagaaaguaauacca

SEQ ID NO: 8232 - RNA, 21 nt, Artificial Sequence
  SAMD9 targeting guide sequence portion
aguaauaccagagugaagauu

SEQ ID NO: 8233 - RNA, 21 nt, Artificial Sequence
  SAMD9 targeting guide sequence portion
agucaaauaaucuucacucug

SEQ ID NO: 8234 - RNA, 21 nt, Artificial Sequence
  SAMD9 targeting guide sequence portion
auaagucaaauaaucuucacu

SEQ ID NO: 8235 - RNA, 21 nt, Artificial Sequence
  SAMD9 targeting guide sequence portion
auaaucuucacucugguauua

SEQ ID NO: 8236 - RNA, 21 nt, Artificial Sequence
  SAMD9 targeting guide sequence portion
auaccagagugaagauuauuu

SEQ ID NO: 8237 - RNA, 21 nt, Artificial Sequence
  SAMD9 targeting guide sequence portion
aucuucacucugguauuacuu

SEQ ID NO: 8238 - RNA, 21 nt, Artificial Sequence
  SAMD9 targeting guide sequence portion
caaauaaucuucacucuggua

SEQ ID NO: 8239 - RNA, 21 nt, Artificial Sequence
  SAMD9 targeting guide sequence portion
cacucugguauuacuuucuga

SEQ ID NO: 8240 - RNA, 21 nt, Artificial Sequence
  SAMD9 targeting guide sequence portion
cagaaaguaauaccagaguga

SEQ ID NO: 8241 - RNA, 21 nt, Artificial Sequence
  SAMD9 targeting guide sequence portion
cagagugaagauuauuugacu

SEQ ID NO: 8242 - RNA, 21 nt, Artificial Sequence
  SAMD9 targeting guide sequence portion
ccagagugaagauuauuugac

SEQ ID NO: 8243 - RNA, 21 nt, Artificial Sequence
  SAMD9 targeting guide sequence portion
cucagaaaguaauaccagagu

SEQ ID NO: 8244 - RNA, 21 nt, Artificial Sequence
  SAMD9 targeting guide sequence portion
cucucagaaaguaauaccaga

SEQ ID NO: 8245 - RNA, 21 nt, Artificial Sequence
  SAMD9 targeting guide sequence portion
cucugguauuacuuucugaga

SEQ ID NO: 8246 - RNA, 21 nt, Artificial Sequence
  SAMD9 targeting guide sequence portion
cugguauuacuuucugagagc

SEQ ID NO: 8247 - RNA, 21 nt, Artificial Sequence
  SAMD9 targeting guide sequence portion
cuucacucugguauuacuuuc

SEQ ID NO: 8248 - RNA, 21 nt, Artificial Sequence
  SAMD9 targeting guide sequence portion
gaaaguaauaccagagugaag

SEQ ID NO: 8249 - RNA, 21 nt, Artificial Sequence
  SAMD9 targeting guide sequence portion
gaaauaagucaaauaaucuuc

SEQ ID NO: 8250 - RNA, 21 nt, Artificial Sequence
  SAMD9 targeting guide sequence portion
gagaaauaagucaaauaaucu

SEQ ID NO: 8251 - RNA, 21 nt, Artificial Sequence
  SAMD9 targeting guide sequence portion
gagugaagauuauuugacuua

SEQ ID NO: 8252 - RNA, 21 nt, Artificial Sequence
  SAMD9 targeting guide sequence portion
gcucucagaaaguaauaccag

SEQ ID NO: 8253 - RNA, 21 nt, Artificial Sequence
  SAMD9 targeting guide sequence portion
guaauaccagagugaagauua

SEQ ID NO: 8254 - RNA, 21 nt, Artificial Sequence
  SAMD9 targeting guide sequence portion
gucaaauaaucuucacucugg

SEQ ID NO: 8255 - RNA, 21 nt, Artificial Sequence
  SAMD9 targeting guide sequence portion
uaagucaaauaaucuucacuc

SEQ ID NO: 8256 - RNA, 21 nt, Artificial Sequence
  SAMD9 targeting guide sequence portion
uaauaccagagugaagauuau

SEQ ID NO: 8257 - RNA, 21 nt, Artificial Sequence
  SAMD9 targeting guide sequence portion
uaaucuucacucugguauuac

SEQ ID NO: 8258 - RNA, 21 nt, Artificial Sequence
  SAMD9 targeting guide sequence portion
uaccagagugaagauuauuug

SEQ ID NO: 8259 - RNA, 21 nt, Artificial Sequence
  SAMD9 targeting guide sequence portion
ucaaauaaucuucacucuggu

SEQ ID NO: 8260 - RNA, 21 nt, Artificial Sequence
  SAMD9 targeting guide sequence portion
ucacucugguauuacuuucug

SEQ ID NO: 8261 - RNA, 21 nt, Artificial Sequence
  SAMD9 targeting guide sequence portion
ucagaaaguaauaccagagug

SEQ ID NO: 8262 - RNA, 21 nt, Artificial Sequence
  SAMD9 targeting guide sequence portion
ucucagaaaguaauaccagag

SEQ ID NO: 8263 - RNA, 21 nt, Artificial Sequence
  SAMD9 targeting guide sequence portion
ucugguauuacuuucugagag

SEQ ID NO: 8264 - RNA, 21 nt, Artificial Sequence
  SAMD9 targeting guide sequence portion
ucuucacucugguauuacuuu

SEQ ID NO: 8265 - RNA, 21 nt, Artificial Sequence
  SAMD9 targeting guide sequence portion
uucacucugguauuacuuucu

SEQ ID NO: 8266 - RNA, 22 nt, Artificial Sequence
  SAMD9 targeting guide sequence portion
aaaaaagcucucagaaaguaau

SEQ ID NO: 8267 - RNA, 22 nt, Artificial Sequence
  SAMD9 targeting guide sequence portion
aaaaagcucucagaaaguaaua

SEQ ID NO: 8268 - RNA, 22 nt, Artificial Sequence
  SAMD9 targeting guide sequence portion
aaaagcucucagaaaguaauac

SEQ ID NO: 8269 - RNA, 22 nt, Artificial Sequence
  SAMD9 targeting guide sequence portion
aaagcucucagaaaguaauacc

SEQ ID NO: 8270 - RNA, 22 nt, Artificial Sequence
  SAMD9 targeting guide sequence portion
aaaguaauaccagagugaagau

SEQ ID NO: 8271 - RNA, 22 nt, Artificial Sequence
  SAMD9 targeting guide sequence portion
aaauaagucaaauaaucuucac

SEQ ID NO: 8272 - RNA, 22 nt, Artificial Sequence
  SAMD9 targeting guide sequence portion
aaauaaucuucacucugguauu

SEQ ID NO: 8273 - RNA, 22 nt, Artificial Sequence
  SAMD9 targeting guide sequence portion
aagcucucagaaaguaauacca

SEQ ID NO: 8274 - RNA, 22 nt, Artificial Sequence
  SAMD9 targeting guide sequence portion
aaguaauaccagagugaagauu

SEQ ID NO: 8275 - RNA, 22 nt, Artificial Sequence
  SAMD9 targeting guide sequence portion
aagucaaauaaucuucacucug

SEQ ID NO: 8276 - RNA, 22 nt, Artificial Sequence
  SAMD9 targeting guide sequence portion
aauaagucaaauaaucuucacu

SEQ ID NO: 8277 - RNA, 22 nt, Artificial Sequence
  SAMD9 targeting guide sequence portion
aauaaucuucacucugguauua

SEQ ID NO: 8278 - RNA, 22 nt, Artificial Sequence
  SAMD9 targeting guide sequence portion
aauaccagagugaagauuauuu

SEQ ID NO: 8279 - RNA, 22 nt, Artificial Sequence
  SAMD9 targeting guide sequence portion
aaucuucacucugguauuacuu

SEQ ID NO: 8280 - RNA, 22 nt, Artificial Sequence
  SAMD9 targeting guide sequence portion
accagagugaagauuauuugac

SEQ ID NO: 8281 - RNA, 22 nt, Artificial Sequence
  SAMD9 targeting guide sequence portion
acucugguauuacuuucugaga

SEQ ID NO: 8282 - RNA, 22 nt, Artificial Sequence
  SAMD9 targeting guide sequence portion
agaaaguaauaccagagugaag

SEQ ID NO: 8283 - RNA, 22 nt, Artificial Sequence
  SAMD9 targeting guide sequence portion
agaaauaagucaaauaaucuuc

SEQ ID NO: 8284 - RNA, 22 nt, Artificial Sequence
  SAMD9 targeting guide sequence portion
agagaaauaagucaaauaaucu

SEQ ID NO: 8285 - RNA, 22 nt, Artificial Sequence
  SAMD9 targeting guide sequence portion
agagugaagauuauuugacuua

SEQ ID NO: 8286 - RNA, 22 nt, Artificial Sequence
  SAMD9 targeting guide sequence portion
agcucucagaaaguaauaccag

SEQ ID NO: 8287 - RNA, 22 nt, Artificial Sequence
  SAMD9 targeting guide sequence portion
aguaauaccagagugaagauua

SEQ ID NO: 8288 - RNA, 22 nt, Artificial Sequence
  SAMD9 targeting guide sequence portion
agucaaauaaucuucacucugg

SEQ ID NO: 8289 - RNA, 22 nt, Artificial Sequence
  SAMD9 targeting guide sequence portion
auaagucaaauaaucuucacuc

SEQ ID NO: 8290 - RNA, 22 nt, Artificial Sequence
  SAMD9 targeting guide sequence portion
auaaucuucacucugguauuac

SEQ ID NO: 8291 - RNA, 22 nt, Artificial Sequence
  SAMD9 targeting guide sequence portion
auaccagagugaagauuauuug

SEQ ID NO: 8292 - RNA, 22 nt, Artificial Sequence
  SAMD9 targeting guide sequence portion
aucuucacucugguauuacuuu

SEQ ID NO: 8293 - RNA, 22 nt, Artificial Sequence
  SAMD9 targeting guide sequence portion
caaauaaucuucacucugguau

SEQ ID NO: 8294 - RNA, 22 nt, Artificial Sequence
  SAMD9 targeting guide sequence portion
cacucugguauuacuuucugag

SEQ ID NO: 8295 - RNA, 22 nt, Artificial Sequence
  SAMD9 targeting guide sequence portion
cagaaaguaauaccagagugaa

SEQ ID NO: 8296 - RNA, 22 nt, Artificial Sequence
  SAMD9 targeting guide sequence portion
cagagugaagauuauuugacuu

SEQ ID NO: 8297 - RNA, 22 nt, Artificial Sequence
  SAMD9 targeting guide sequence portion
ccagagugaagauuauuugacu

SEQ ID NO: 8298 - RNA, 22 nt, Artificial Sequence
  SAMD9 targeting guide sequence portion
cucagaaaguaauaccagagug

SEQ ID NO: 8299 - RNA, 22 nt, Artificial Sequence
  SAMD9 targeting guide sequence portion
cucucagaaaguaauaccagag

SEQ ID NO: 8300 - RNA, 22 nt, Artificial Sequence
  SAMD9 targeting guide sequence portion
cucugguauuacuuucugagag

SEQ ID NO: 8301 - RNA, 22 nt, Artificial Sequence
  SAMD9 targeting guide sequence portion
cugguauuacuuucugagagcu

SEQ ID NO: 8302 - RNA, 22 nt, Artificial Sequence
  SAMD9 targeting guide sequence portion
cuucacucugguauuacuuucu

SEQ ID NO: 8303 - RNA, 22 nt, Artificial Sequence
  SAMD9 targeting guide sequence portion
gaaaaaagcucucagaaaguaa

SEQ ID NO: 8304 - RNA, 22 nt, Artificial Sequence
  SAMD9 targeting guide sequence portion
gaaaguaauaccagagugaaga

SEQ ID NO: 8305 - RNA, 22 nt, Artificial Sequence
  SAMD9 targeting guide sequence portion
gaaauaagucaaauaaucuuca

SEQ ID NO: 8306 - RNA, 22 nt, Artificial Sequence
  SAMD9 targeting guide sequence portion
gagaaauaagucaaauaaucuu

SEQ ID NO: 8307 - RNA, 22 nt, Artificial Sequence
  SAMD9 targeting guide sequence portion
gagugaagauuauuugacuuau

SEQ ID NO: 8308 - RNA, 22 nt, Artificial Sequence
  SAMD9 targeting guide sequence portion
gcucucagaaaguaauaccaga

SEQ ID NO: 8309 - RNA, 22 nt, Artificial Sequence
  SAMD9 targeting guide sequence portion
guaauaccagagugaagauuau

SEQ ID NO: 8310 - RNA, 22 nt, Artificial Sequence
  SAMD9 targeting guide sequence portion
gucaaauaaucuucacucuggu

SEQ ID NO: 8311 - RNA, 22 nt, Artificial Sequence
  SAMD9 targeting guide sequence portion
uaagucaaauaaucuucacucu

SEQ ID NO: 8312 - RNA, 22 nt, Artificial Sequence
  SAMD9 targeting guide sequence portion
uaauaccagagugaagauuauu

SEQ ID NO: 8313 - RNA, 22 nt, Artificial Sequence
  SAMD9 targeting guide sequence portion
uaaucuucacucugguauuacu

SEQ ID NO: 8314 - RNA, 22 nt, Artificial Sequence
  SAMD9 targeting guide sequence portion
uaccagagugaagauuauuuga

SEQ ID NO: 8315 - RNA, 22 nt, Artificial Sequence
  SAMD9 targeting guide sequence portion
ucaaauaaucuucacucuggua

SEQ ID NO: 8316 - RNA, 22 nt, Artificial Sequence
  SAMD9 targeting guide sequence portion
ucacucugguauuacuuucuga

SEQ ID NO: 8317 - RNA, 22 nt, Artificial Sequence
  SAMD9 targeting guide sequence portion
ucagaaaguaauaccagaguga

SEQ ID NO: 8318 - RNA, 22 nt, Artificial Sequence
  SAMD9 targeting guide sequence portion
ucucagaaaguaauaccagagu

SEQ ID NO: 8319 - RNA, 22 nt, Artificial Sequence
  SAMD9 targeting guide sequence portion
ucugguauuacuuucugagagc

SEQ ID NO: 8320 - RNA, 22 nt, Artificial Sequence
  SAMD9 targeting guide sequence portion
ucuucacucugguauuacuuuc

SEQ ID NO: 8321 - RNA, 22 nt, Artificial Sequence
  SAMD9 targeting guide sequence portion
uucacucugguauuacuuucug

SEQ ID NO: 8322 - RNA, 20 nt, Artificial Sequence
  SAMD9 targeting guide sequence portion
aaaguaauaccaaagugaag

SEQ ID NO: 8323 - RNA, 20 nt, Artificial Sequence
  SAMD9 targeting guide sequence portion
aaagugaagauuauuugacu

SEQ ID NO: 8324 - RNA, 20 nt, Artificial Sequence
  SAMD9 targeting guide sequence portion
aaauaaucuucacuuuggua

SEQ ID NO: 8325 - RNA, 20 nt, Artificial Sequence
  SAMD9 targeting guide sequence portion
aaguaauaccaaagugaaga

SEQ ID NO: 8326 - RNA, 20 nt, Artificial Sequence
  SAMD9 targeting guide sequence portion
aagucaaauaaucuucacuu

SEQ ID NO: 8327 - RNA, 20 nt, Artificial Sequence
  SAMD9 targeting guide sequence portion
aagugaagauuauuugacuu

SEQ ID NO: 8328 - RNA, 20 nt, Artificial Sequence
  SAMD9 targeting guide sequence portion
aauaaucuucacuuugguau

SEQ ID NO: 8329 - RNA, 20 nt, Artificial Sequence
  SAMD9 targeting guide sequence portion
aauaccaaagugaagauuau

SEQ ID NO: 8330 - RNA, 20 nt, Artificial Sequence
  SAMD9 targeting guide sequence portion
aaucuucacuuugguauuac

SEQ ID NO: 8331 - RNA, 20 nt, Artificial Sequence
  SAMD9 targeting guide sequence portion
accaaagugaagauuauuug

SEQ ID NO: 8332 - RNA, 20 nt, Artificial Sequence
  SAMD9 targeting guide sequence portion
acuuugguauuacuuucuga

SEQ ID NO: 8333 - RNA, 20 nt, Artificial Sequence
  SAMD9 targeting guide sequence portion
agaaaguaauaccaaaguga

SEQ ID NO: 8334 - RNA, 20 nt, Artificial Sequence
  SAMD9 targeting guide sequence portion
aguaauaccaaagugaagau

SEQ ID NO: 8335 - RNA, 20 nt, Artificial Sequence
  SAMD9 targeting guide sequence portion
agucaaauaaucuucacuuu

SEQ ID NO: 8336 - RNA, 20 nt, Artificial Sequence
  SAMD9 targeting guide sequence portion
auaaucuucacuuugguauu

SEQ ID NO: 8337 - RNA, 20 nt, Artificial Sequence
  SAMD9 targeting guide sequence portion
auaccaaagugaagauuauu

SEQ ID NO: 8338 - RNA, 20 nt, Artificial Sequence
  SAMD9 targeting guide sequence portion
aucuucacuuugguauuacu

SEQ ID NO: 8339 - RNA, 20 nt, Artificial Sequence
  SAMD9 targeting guide sequence portion
caaagugaagauuauuugac

SEQ ID NO: 8340 - RNA, 20 nt, Artificial Sequence
  SAMD9 targeting guide sequence portion
caaauaaucuucacuuuggu

SEQ ID NO: 8341 - RNA, 20 nt, Artificial Sequence
  SAMD9 targeting guide sequence portion
cacuuugguauuacuuucug

SEQ ID NO: 8342 - RNA, 20 nt, Artificial Sequence
  SAMD9 targeting guide sequence portion
cagaaaguaauaccaaagug

SEQ ID NO: 8343 - RNA, 20 nt, Artificial Sequence
  SAMD9 targeting guide sequence portion
ccaaagugaagauuauuuga

SEQ ID NO: 8344 - RNA, 20 nt, Artificial Sequence
  SAMD9 targeting guide sequence portion
cucagaaaguaauaccaaag

SEQ ID NO: 8345 - RNA, 20 nt, Artificial Sequence
  SAMD9 targeting guide sequence portion
cucucagaaaguaauaccaa

SEQ ID NO: 8346 - RNA, 20 nt, Artificial Sequence
  SAMD9 targeting guide sequence portion
cuucacuuugguauuacuuu

SEQ ID NO: 8347 - RNA, 20 nt, Artificial Sequence
  SAMD9 targeting guide sequence portion
cuuugguauuacuuucugag

SEQ ID NO: 8348 - RNA, 20 nt, Artificial Sequence
  SAMD9 targeting guide sequence portion
gaaaguaauaccaaagugaa

SEQ ID NO: 8349 - RNA, 20 nt, Artificial Sequence
  SAMD9 targeting guide sequence portion
guaauaccaaagugaagauu

SEQ ID NO: 8350 - RNA, 20 nt, Artificial Sequence
  SAMD9 targeting guide sequence portion
gucaaauaaucuucacuuug

SEQ ID NO: 8351 - RNA, 20 nt, Artificial Sequence
  SAMD9 targeting guide sequence portion
uaauaccaaagugaagauua

SEQ ID NO: 8352 - RNA, 20 nt, Artificial Sequence
  SAMD9 targeting guide sequence portion
uaaucuucacuuugguauua

SEQ ID NO: 8353 - RNA, 20 nt, Artificial Sequence
  SAMD9 targeting guide sequence portion
uaccaaagugaagauuauuu

SEQ ID NO: 8354 - RNA, 20 nt, Artificial Sequence
  SAMD9 targeting guide sequence portion
ucaaauaaucuucacuuugg

SEQ ID NO: 8355 - RNA, 20 nt, Artificial Sequence
  SAMD9 targeting guide sequence portion
ucacuuugguauuacuuucu

SEQ ID NO: 8356 - RNA, 20 nt, Artificial Sequence
  SAMD9 targeting guide sequence portion
ucagaaaguaauaccaaagu

SEQ ID NO: 8357 - RNA, 20 nt, Artificial Sequence
  SAMD9 targeting guide sequence portion
ucucagaaaguaauaccaaa

SEQ ID NO: 8358 - RNA, 20 nt, Artificial Sequence
  SAMD9 targeting guide sequence portion
ucuucacuuugguauuacuu

SEQ ID NO: 8359 - RNA, 20 nt, Artificial Sequence
  SAMD9 targeting guide sequence portion
uucacuuugguauuacuuuc

SEQ ID NO: 8360 - RNA, 20 nt, Artificial Sequence
  SAMD9 targeting guide sequence portion
uugguauuacuuucugagag

SEQ ID NO: 8361 - RNA, 20 nt, Artificial Sequence
  SAMD9 targeting guide sequence portion
uuugguauuacuuucugaga

SEQ ID NO: 8362 - RNA, 21 nt, Artificial Sequence
  SAMD9 targeting guide sequence portion
aaaguaauaccaaagugaaga

SEQ ID NO: 8363 - RNA, 21 nt, Artificial Sequence
  SAMD9 targeting guide sequence portion
aaagugaagauuauuugacuu

SEQ ID NO: 8364 - RNA, 21 nt, Artificial Sequence
  SAMD9 targeting guide sequence portion
aaauaaucuucacuuugguau

SEQ ID NO: 8365 - RNA, 21 nt, Artificial Sequence
  SAMD9 targeting guide sequence portion
aaguaauaccaaagugaagau

SEQ ID NO: 8366 - RNA, 21 nt, Artificial Sequence
  SAMD9 targeting guide sequence portion
aagucaaauaaucuucacuuu

SEQ ID NO: 8367 - RNA, 21 nt, Artificial Sequence
  SAMD9 targeting guide sequence portion
aagugaagauuauuugacuua

SEQ ID NO: 8368 - RNA, 21 nt, Artificial Sequence
  SAMD9 targeting guide sequence portion
aauaaucuucacuuugguauu

SEQ ID NO: 8369 - RNA, 21 nt, Artificial Sequence
  SAMD9 targeting guide sequence portion
aauaccaaagugaagauuauu

SEQ ID NO: 8370 - RNA, 21 nt, Artificial Sequence
  SAMD9 targeting guide sequence portion
aaucuucacuuugguauuacu

SEQ ID NO: 8371 - RNA, 21 nt, Artificial Sequence
  SAMD9 targeting guide sequence portion
accaaagugaagauuauuuga

SEQ ID NO: 8372 - RNA, 21 nt, Artificial Sequence
  SAMD9 targeting guide sequence portion
acuuugguauuacuuucugag

SEQ ID NO: 8373 - RNA, 21 nt, Artificial Sequence
  SAMD9 targeting guide sequence portion
agaaaguaauaccaaagugaa

SEQ ID NO: 8374 - RNA, 21 nt, Artificial Sequence
  SAMD9 targeting guide sequence portion
aguaauaccaaagugaagauu

SEQ ID NO: 8375 - RNA, 21 nt, Artificial Sequence
  SAMD9 targeting guide sequence portion
agucaaauaaucuucacuuug

SEQ ID NO: 8376 - RNA, 21 nt, Artificial Sequence
  SAMD9 targeting guide sequence portion
auaaucuucacuuugguauua

SEQ ID NO: 8377 - RNA, 21 nt, Artificial Sequence
  SAMD9 targeting guide sequence portion
auaccaaagugaagauuauuu

SEQ ID NO: 8378 - RNA, 21 nt, Artificial Sequence
  SAMD9 targeting guide sequence portion
aucuucacuuugguauuacuu

SEQ ID NO: 8379 - RNA, 21 nt, Artificial Sequence
  SAMD9 targeting guide sequence portion
caaagugaagauuauuugacu

SEQ ID NO: 8380 - RNA, 21 nt, Artificial Sequence
  SAMD9 targeting guide sequence portion
caaauaaucuucacuuuggua

SEQ ID NO: 8381 - RNA, 21 nt, Artificial Sequence
  SAMD9 targeting guide sequence portion
cacuuugguauuacuuucuga

SEQ ID NO: 8382 - RNA, 21 nt, Artificial Sequence
  SAMD9 targeting guide sequence portion
cagaaaguaauaccaaaguga

SEQ ID NO: 8383 - RNA, 21 nt, Artificial Sequence
  SAMD9 targeting guide sequence portion
ccaaagugaagauuauuugac

SEQ ID NO: 8384 - RNA, 21 nt, Artificial Sequence
  SAMD9 targeting guide sequence portion
cucagaaaguaauaccaaagu

SEQ ID NO: 8385 - RNA, 21 nt, Artificial Sequence
  SAMD9 targeting guide sequence portion
cucucagaaaguaauaccaaa

SEQ ID NO: 8386 - RNA, 21 nt, Artificial Sequence
  SAMD9 targeting guide sequence portion
cuucacuuugguauuacuuuc

SEQ ID NO: 8387 - RNA, 21 nt, Artificial Sequence
  SAMD9 targeting guide sequence portion
cuuugguauuacuuucugaga

SEQ ID NO: 8388 - RNA, 21 nt, Artificial Sequence
  SAMD9 targeting guide sequence portion
gaaaguaauaccaaagugaag

SEQ ID NO: 8389 - RNA, 21 nt, Artificial Sequence
  SAMD9 targeting guide sequence portion
gcucucagaaaguaauaccaa

SEQ ID NO: 8390 - RNA, 21 nt, Artificial Sequence
  SAMD9 targeting guide sequence portion
guaauaccaaagugaagauua

SEQ ID NO: 8391 - RNA, 21 nt, Artificial Sequence
  SAMD9 targeting guide sequence portion
gucaaauaaucuucacuuugg

SEQ ID NO: 8392 - RNA, 21 nt, Artificial Sequence
  SAMD9 targeting guide sequence portion
uaagucaaauaaucuucacuu

SEQ ID NO: 8393 - RNA, 21 nt, Artificial Sequence
  SAMD9 targeting guide sequence portion
uaauaccaaagugaagauuau

SEQ ID NO: 8394 - RNA, 21 nt, Artificial Sequence
  SAMD9 targeting guide sequence portion
uaaucuucacuuugguauuac

SEQ ID NO: 8395 - RNA, 21 nt, Artificial Sequence
  SAMD9 targeting guide sequence portion
uaccaaagugaagauuauuug

SEQ ID NO: 8396 - RNA, 21 nt, Artificial Sequence
  SAMD9 targeting guide sequence portion
ucaaauaaucuucacuuuggu

SEQ ID NO: 8397 - RNA, 21 nt, Artificial Sequence
  SAMD9 targeting guide sequence portion
ucacuuugguauuacuuucug

SEQ ID NO: 8398 - RNA, 21 nt, Artificial Sequence
  SAMD9 targeting guide sequence portion
ucagaaaguaauaccaaagug

SEQ ID NO: 8399 - RNA, 21 nt, Artificial Sequence
  SAMD9 targeting guide sequence portion
ucucagaaaguaauaccaaag

SEQ ID NO: 8400 - RNA, 21 nt, Artificial Sequence
  SAMD9 targeting guide sequence portion
ucuucacuuugguauuacuuu

SEQ ID NO: 8401 - RNA, 21 nt, Artificial Sequence
  SAMD9 targeting guide sequence portion
uucacuuugguauuacuuucu

SEQ ID NO: 8402 - RNA, 21 nt, Artificial Sequence
  SAMD9 targeting guide sequence portion
uugguauuacuuucugagagc

SEQ ID NO: 8403 - RNA, 21 nt, Artificial Sequence
  SAMD9 targeting guide sequence portion
uuugguauuacuuucugagag

SEQ ID NO: 8404 - RNA, 22 nt, Artificial Sequence
  SAMD9 targeting guide sequence portion
aaaguaauaccaaagugaagau

SEQ ID NO: 8405 - RNA, 22 nt, Artificial Sequence
  SAMD9 targeting guide sequence portion
aaagugaagauuauuugacuua

SEQ ID NO: 8406 - RNA, 22 nt, Artificial Sequence
  SAMD9 targeting guide sequence portion
aaauaaucuucacuuugguauu

SEQ ID NO: 8407 - RNA, 22 nt, Artificial Sequence
  SAMD9 targeting guide sequence portion
aaguaauaccaaagugaagauu

SEQ ID NO: 8408 - RNA, 22 nt, Artificial Sequence
  SAMD9 targeting guide sequence portion
aagucaaauaaucuucacuuug

SEQ ID NO: 8409 - RNA, 22 nt, Artificial Sequence
  SAMD9 targeting guide sequence portion
aagugaagauuauuugacuuau

SEQ ID NO: 8410 - RNA, 22 nt, Artificial Sequence
  SAMD9 targeting guide sequence portion
aauaaucuucacuuugguauua

SEQ ID NO: 8411 - RNA, 22 nt, Artificial Sequence
  SAMD9 targeting guide sequence portion
aauaccaaagugaagauuauuu

SEQ ID NO: 8412 - RNA, 22 nt, Artificial Sequence
  SAMD9 targeting guide sequence portion
aaucuucacuuugguauuacuu

SEQ ID NO: 8413 - RNA, 22 nt, Artificial Sequence
  SAMD9 targeting guide sequence portion
accaaagugaagauuauuugac

SEQ ID NO: 8414 - RNA, 22 nt, Artificial Sequence
  SAMD9 targeting guide sequence portion
acuuugguauuacuuucugaga

SEQ ID NO: 8415 - RNA, 22 nt, Artificial Sequence
  SAMD9 targeting guide sequence portion
agaaaguaauaccaaagugaag

SEQ ID NO: 8416 - RNA, 22 nt, Artificial Sequence
  SAMD9 targeting guide sequence portion
agcucucagaaaguaauaccaa

SEQ ID NO: 8417 - RNA, 22 nt, Artificial Sequence
  SAMD9 targeting guide sequence portion
aguaauaccaaagugaagauua

SEQ ID NO: 8418 - RNA, 22 nt, Artificial Sequence
  SAMD9 targeting guide sequence portion
agucaaauaaucuucacuuugg

SEQ ID NO: 8419 - RNA, 22 nt, Artificial Sequence
  SAMD9 targeting guide sequence portion
auaagucaaauaaucuucacuu

SEQ ID NO: 8420 - RNA, 22 nt, Artificial Sequence
  SAMD9 targeting guide sequence portion
auaaucuucacuuugguauuac

SEQ ID NO: 8421 - RNA, 22 nt, Artificial Sequence
  SAMD9 targeting guide sequence portion
auaccaaagugaagauuauuug

SEQ ID NO: 8422 - RNA, 22 nt, Artificial Sequence
  SAMD9 targeting guide sequence portion
aucuucacuuugguauuacuuu

SEQ ID NO: 8423 - RNA, 22 nt, Artificial Sequence
  SAMD9 targeting guide sequence portion
caaagugaagauuauuugacuu

SEQ ID NO: 8424 - RNA, 22 nt, Artificial Sequence
  SAMD9 targeting guide sequence portion
caaauaaucuucacuuugguau

SEQ ID NO: 8425 - RNA, 22 nt, Artificial Sequence
  SAMD9 targeting guide sequence portion
cacuuugguauuacuuucugag

SEQ ID NO: 8426 - RNA, 22 nt, Artificial Sequence
  SAMD9 targeting guide sequence portion
cagaaaguaauaccaaagugaa

SEQ ID NO: 8427 - RNA, 22 nt, Artificial Sequence
  SAMD9 targeting guide sequence portion
ccaaagugaagauuauuugacu

SEQ ID NO: 8428 - RNA, 22 nt, Artificial Sequence
  SAMD9 targeting guide sequence portion
cucagaaaguaauaccaaagug

SEQ ID NO: 8429 - RNA, 22 nt, Artificial Sequence
  SAMD9 targeting guide sequence portion
cucucagaaaguaauaccaaag

SEQ ID NO: 8430 - RNA, 22 nt, Artificial Sequence
  SAMD9 targeting guide sequence portion
cuucacuuugguauuacuuucu

SEQ ID NO: 8431 - RNA, 22 nt, Artificial Sequence
  SAMD9 targeting guide sequence portion
cuuugguauuacuuucugagag

SEQ ID NO: 8432 - RNA, 22 nt, Artificial Sequence
  SAMD9 targeting guide sequence portion
gaaaguaauaccaaagugaaga

SEQ ID NO: 8433 - RNA, 22 nt, Artificial Sequence
  SAMD9 targeting guide sequence portion
gcucucagaaaguaauaccaaa

SEQ ID NO: 8434 - RNA, 22 nt, Artificial Sequence
  SAMD9 targeting guide sequence portion
guaauaccaaagugaagauuau

SEQ ID NO: 8435 - RNA, 22 nt, Artificial Sequence
  SAMD9 targeting guide sequence portion
gucaaauaaucuucacuuuggu

SEQ ID NO: 8436 - RNA, 22 nt, Artificial Sequence
  SAMD9 targeting guide sequence portion
uaagucaaauaaucuucacuuu

SEQ ID NO: 8437 - RNA, 22 nt, Artificial Sequence
  SAMD9 targeting guide sequence portion
uaauaccaaagugaagauuauu

SEQ ID NO: 8438 - RNA, 22 nt, Artificial Sequence
  SAMD9 targeting guide sequence portion
uaaucuucacuuugguauuacu

SEQ ID NO: 8439 - RNA, 22 nt, Artificial Sequence
  SAMD9 targeting guide sequence portion
uaccaaagugaagauuauuuga

SEQ ID NO: 8440 - RNA, 22 nt, Artificial Sequence
  SAMD9 targeting guide sequence portion
ucaaauaaucuucacuuuggua

SEQ ID NO: 8441 - RNA, 22 nt, Artificial Sequence
  SAMD9 targeting guide sequence portion
ucacuuugguauuacuuucuga

SEQ ID NO: 8442 - RNA, 22 nt, Artificial Sequence
  SAMD9 targeting guide sequence portion
ucagaaaguaauaccaaaguga

SEQ ID NO: 8443 - RNA, 22 nt, Artificial Sequence
  SAMD9 targeting guide sequence portion
ucucagaaaguaauaccaaagu

SEQ ID NO: 8444 - RNA, 22 nt, Artificial Sequence
  SAMD9 targeting guide sequence portion
ucuucacuuugguauuacuuuc

SEQ ID NO: 8445 - RNA, 22 nt, Artificial Sequence
  SAMD9 targeting guide sequence portion
uucacuuugguauuacuuucug

SEQ ID NO: 8446 - RNA, 22 nt, Artificial Sequence
  SAMD9 targeting guide sequence portion
uugguauuacuuucugagagcu

SEQ ID NO: 8447 - RNA, 22 nt, Artificial Sequence
  SAMD9 targeting guide sequence portion
uuugguauuacuuucugagagc

SEQ ID NO: 8448 - RNA, 20 nt, Artificial Sequence
  SAMD9 targeting guide sequence portion
aaaaaagaaagaaaaaagcu

SEQ ID NO: 8449 - RNA, 20 nt, Artificial Sequence
  SAMD9 targeting guide sequence portion
aaaaagaaagaaaaaagcuc

SEQ ID NO: 8450 - RNA, 20 nt, Artificial Sequence
  SAMD9 targeting guide sequence portion
aaaagaaagaaaaaagcucu

SEQ ID NO: 8451 - RNA, 20 nt, Artificial Sequence
  SAMD9 targeting guide sequence portion
aaagaaagaaaaaagcucuc

SEQ ID NO: 8452 - RNA, 20 nt, Artificial Sequence
  SAMD9 targeting guide sequence portion
aagaaagaaaaaagcucuca

SEQ ID NO: 8453 - RNA, 20 nt, Artificial Sequence
  SAMD9 targeting guide sequence portion
acuuucugagagcuuuuuuc

SEQ ID NO: 8454 - RNA, 20 nt, Artificial Sequence
  SAMD9 targeting guide sequence portion
agaaagaaaaaagcucucag

SEQ ID NO: 8455 - RNA, 20 nt, Artificial Sequence
  SAMD9 targeting guide sequence portion
agcuuuuuucuuucuuuuuu

SEQ ID NO: 8456 - RNA, 20 nt, Artificial Sequence
  SAMD9 targeting guide sequence portion
cuauuuaggaugugaaaaaa

SEQ ID NO: 8457 - RNA, 20 nt, Artificial Sequence
  SAMD9 targeting guide sequence portion
cugagagcuuuuuucuuucu

SEQ ID NO: 8458 - RNA, 20 nt, Artificial Sequence
  SAMD9 targeting guide sequence portion
cuuucugagagcuuuuuucu

SEQ ID NO: 8459 - RNA, 20 nt, Artificial Sequence
  SAMD9 targeting guide sequence portion
gaaagaaaaaagcucucaga

SEQ ID NO: 8460 - RNA, 20 nt, Artificial Sequence
  SAMD9 targeting guide sequence portion
gagagcuuuuuucuuucuuu

SEQ ID NO: 8461 - RNA, 20 nt, Artificial Sequence
  SAMD9 targeting guide sequence portion
uacuuucugagagcuuuuuu

SEQ ID NO: 8462 - RNA, 20 nt, Artificial Sequence
  SAMD9 targeting guide sequence portion
ucugagagcuuuuuucuuuc

SEQ ID NO: 8463 - RNA, 20 nt, Artificial Sequence
  SAMD9 targeting guide sequence portion
ugagagcuuuuuucuuucuu

SEQ ID NO: 8464 - RNA, 20 nt, Artificial Sequence
  SAMD9 targeting guide sequence portion
uuacuuucugagagcuuuuu

SEQ ID NO: 8465 - RNA, 20 nt, Artificial Sequence
  SAMD9 targeting guide sequence portion
uucugagagcuuuuuucuuu

SEQ ID NO: 8466 - RNA, 20 nt, Artificial Sequence
  SAMD9 targeting guide sequence portion
uuucugagagcuuuuuucuu

SEQ ID NO: 8467 - RNA, 21 nt, Artificial Sequence
  SAMD9 targeting guide sequence portion
aaaaaagaaagaaaaaagcuc

SEQ ID NO: 8468 - RNA, 21 nt, Artificial Sequence
  SAMD9 targeting guide sequence portion
aaaaagaaagaaaaaagcucu

SEQ ID NO: 8469 - RNA, 21 nt, Artificial Sequence
  SAMD9 targeting guide sequence portion
aaaagaaagaaaaaagcucuc

SEQ ID NO: 8470 - RNA, 21 nt, Artificial Sequence
  SAMD9 targeting guide sequence portion
aaagaaagaaaaaagcucuca

SEQ ID NO: 8471 - RNA, 21 nt, Artificial Sequence
  SAMD9 targeting guide sequence portion
aagaaagaaaaaagcucucag

SEQ ID NO: 8472 - RNA, 21 nt, Artificial Sequence
  SAMD9 targeting guide sequence portion
acuuucugagagcuuuuuucu

SEQ ID NO: 8473 - RNA, 21 nt, Artificial Sequence
  SAMD9 targeting guide sequence portion
agaaagaaaaaagcucucaga

SEQ ID NO: 8474 - RNA, 21 nt, Artificial Sequence
  SAMD9 targeting guide sequence portion
auuacuuucugagagcuuuuu

SEQ ID NO: 8475 - RNA, 21 nt, Artificial Sequence
  SAMD9 targeting guide sequence portion
cugagagcuuuuuucuuucuu

SEQ ID NO: 8476 - RNA, 21 nt, Artificial Sequence
  SAMD9 targeting guide sequence portion
cuuucugagagcuuuuuucuu

SEQ ID NO: 8477 - RNA, 21 nt, Artificial Sequence
  SAMD9 targeting guide sequence portion
gaaagaaaaaagcucucagaa

SEQ ID NO: 8478 - RNA, 21 nt, Artificial Sequence
  SAMD9 targeting guide sequence portion
gagagcuuuuuucuuucuuuu

SEQ ID NO: 8479 - RNA, 21 nt, Artificial Sequence
  SAMD9 targeting guide sequence portion
gagcuuuuuucuuucuuuuuu

SEQ ID NO: 8480 - RNA, 21 nt, Artificial Sequence
  SAMD9 targeting guide sequence portion
gcuauuuaggaugugaaaaaa

SEQ ID NO: 8481 - RNA, 21 nt, Artificial Sequence
  SAMD9 targeting guide sequence portion
uacuuucugagagcuuuuuuc

SEQ ID NO: 8482 - RNA, 21 nt, Artificial Sequence
  SAMD9 targeting guide sequence portion
ucugagagcuuuuuucuuucu

SEQ ID NO: 8483 - RNA, 21 nt, Artificial Sequence
  SAMD9 targeting guide sequence portion
ugagagcuuuuuucuuucuuu

SEQ ID NO: 8484 - RNA, 21 nt, Artificial Sequence
  SAMD9 targeting guide sequence portion
uuacuuucugagagcuuuuuu

SEQ ID NO: 8485 - RNA, 21 nt, Artificial Sequence
  SAMD9 targeting guide sequence portion
uucugagagcuuuuuucuuuc

SEQ ID NO: 8486 - RNA, 21 nt, Artificial Sequence
  SAMD9 targeting guide sequence portion
uuucugagagcuuuuuucuuu

SEQ ID NO: 8487 - RNA, 22 nt, Artificial Sequence
  SAMD9 targeting guide sequence portion
aaaaaagaaagaaaaaagcucu

SEQ ID NO: 8488 - RNA, 22 nt, Artificial Sequence
  SAMD9 targeting guide sequence portion
aaaaagaaagaaaaaagcucuc

SEQ ID NO: 8489 - RNA, 22 nt, Artificial Sequence
  SAMD9 targeting guide sequence portion
aaaagaaagaaaaaagcucuca

SEQ ID NO: 8490 - RNA, 22 nt, Artificial Sequence
  SAMD9 targeting guide sequence portion
aaagaaagaaaaaagcucucag

SEQ ID NO: 8491 - RNA, 22 nt, Artificial Sequence
  SAMD9 targeting guide sequence portion
aagaaagaaaaaagcucucaga

SEQ ID NO: 8492 - RNA, 22 nt, Artificial Sequence
  SAMD9 targeting guide sequence portion
acuuucugagagcuuuuuucuu

SEQ ID NO: 8493 - RNA, 22 nt, Artificial Sequence
  SAMD9 targeting guide sequence portion
agaaagaaaaaagcucucagaa

SEQ ID NO: 8494 - RNA, 22 nt, Artificial Sequence
  SAMD9 targeting guide sequence portion
agagcuuuuuucuuucuuuuuu

SEQ ID NO: 8495 - RNA, 22 nt, Artificial Sequence
  SAMD9 targeting guide sequence portion
auuacuuucugagagcuuuuuu

SEQ ID NO: 8496 - RNA, 22 nt, Artificial Sequence
  SAMD9 targeting guide sequence portion
cugagagcuuuuuucuuucuuu

SEQ ID NO: 8497 - RNA, 22 nt, Artificial Sequence
  SAMD9 targeting guide sequence portion
cuuucugagagcuuuuuucuuu

SEQ ID NO: 8498 - RNA, 22 nt, Artificial Sequence
  SAMD9 targeting guide sequence portion
gaaagaaaaaagcucucagaaa

SEQ ID NO: 8499 - RNA, 22 nt, Artificial Sequence
  SAMD9 targeting guide sequence portion
gagagcuuuuuucuuucuuuuu

SEQ ID NO: 8500 - RNA, 22 nt, Artificial Sequence
  SAMD9 targeting guide sequence portion
ggcuauuuaggaugugaaaaaa

SEQ ID NO: 8501 - RNA, 22 nt, Artificial Sequence
  SAMD9 targeting guide sequence portion
uacuuucugagagcuuuuuucu

SEQ ID NO: 8502 - RNA, 22 nt, Artificial Sequence
  SAMD9 targeting guide sequence portion
uauuacuuucugagagcuuuuu

SEQ ID NO: 8503 - RNA, 22 nt, Artificial Sequence
  SAMD9 targeting guide sequence portion
ucugagagcuuuuuucuuucuu

SEQ ID NO: 8504 - RNA, 22 nt, Artificial Sequence
  SAMD9 targeting guide sequence portion
ugagagcuuuuuucuuucuuuu

SEQ ID NO: 8505 - RNA, 22 nt, Artificial Sequence
  SAMD9 targeting guide sequence portion
uuacuuucugagagcuuuuuuc

SEQ ID NO: 8506 - RNA, 22 nt, Artificial Sequence
  SAMD9 targeting guide sequence portion
uucugagagcuuuuuucuuucu

SEQ ID NO: 8507 - RNA, 22 nt, Artificial Sequence
  SAMD9 targeting guide sequence portion
uuucugagagcuuuuuucuuuc

SEQ ID NO: 8508 - RNA, 20 nt, Artificial Sequence
  SAMD9 targeting guide sequence portion
aacuacaauggugggacaag

SEQ ID NO: 8509 - RNA, 20 nt, Artificial Sequence
  SAMD9 targeting guide sequence portion
aagcauacgauaaacauucc

SEQ ID NO: 8510 - RNA, 20 nt, Artificial Sequence
  SAMD9 targeting guide sequence portion
aauggugggacaagcauacg

SEQ ID NO: 8511 - RNA, 20 nt, Artificial Sequence
  SAMD9 targeting guide sequence portion
aauguuuaucguaugcuugu

SEQ ID NO: 8512 - RNA, 20 nt, Artificial Sequence
  SAMD9 targeting guide sequence portion
acaagcauacgauaaacauu

SEQ ID NO: 8513 - RNA, 20 nt, Artificial Sequence
  SAMD9 targeting guide sequence portion
acaauggugggacaagcaua

SEQ ID NO: 8514 - RNA, 20 nt, Artificial Sequence
  SAMD9 targeting guide sequence portion
acgauaaacauuccuagucc

SEQ ID NO: 8515 - RNA, 20 nt, Artificial Sequence
  SAMD9 targeting guide sequence portion
acuacaauggugggacaagc

SEQ ID NO: 8516 - RNA, 20 nt, Artificial Sequence
  SAMD9 targeting guide sequence portion
acuaggaauguuuaucguau

SEQ ID NO: 8517 - RNA, 20 nt, Artificial Sequence
  SAMD9 targeting guide sequence portion
agcauacgauaaacauuccu

SEQ ID NO: 8518 - RNA, 20 nt, Artificial Sequence
  SAMD9 targeting guide sequence portion
aggaauguuuaucguaugcu

SEQ ID NO: 8519 - RNA, 20 nt, Artificial Sequence
  SAMD9 targeting guide sequence portion
auacgauaaacauuccuagu

SEQ ID NO: 8520 - RNA, 20 nt, Artificial Sequence
  SAMD9 targeting guide sequence portion
aucguaugcuugucccacca

SEQ ID NO: 8521 - RNA, 20 nt, Artificial Sequence
  SAMD9 targeting guide sequence portion
auggugggacaagcauacga

SEQ ID NO: 8522 - RNA, 20 nt, Artificial Sequence
  SAMD9 targeting guide sequence portion
auguuuaucguaugcuuguc

SEQ ID NO: 8523 - RNA, 20 nt, Artificial Sequence
  SAMD9 targeting guide sequence portion
caacuacaauggugggacaa

SEQ ID NO: 8524 - RNA, 20 nt, Artificial Sequence
  SAMD9 targeting guide sequence portion
caagcauacgauaaacauuc

SEQ ID NO: 8525 - RNA, 20 nt, Artificial Sequence
  SAMD9 targeting guide sequence portion
caauggugggacaagcauac

SEQ ID NO: 8526 - RNA, 20 nt, Artificial Sequence
  SAMD9 targeting guide sequence portion
cauacgauaaacauuccuag

SEQ ID NO: 8527 - RNA, 20 nt, Artificial Sequence
  SAMD9 targeting guide sequence portion
cccuuuuggacuaggaaugu

SEQ ID NO: 8528 - RNA, 20 nt, Artificial Sequence
  SAMD9 targeting guide sequence portion
ccuuuuggacuaggaauguu

SEQ ID NO: 8529 - RNA, 20 nt, Artificial Sequence
  SAMD9 targeting guide sequence portion
cgauaaacauuccuagucca

SEQ ID NO: 8530 - RNA, 20 nt, Artificial Sequence
  SAMD9 targeting guide sequence portion
cguaugcuugucccaccauu

SEQ ID NO: 8531 - RNA, 20 nt, Artificial Sequence
  SAMD9 targeting guide sequence portion
cuacaauggugggacaagca

SEQ ID NO: 8532 - RNA, 20 nt, Artificial Sequence
  SAMD9 targeting guide sequence portion
cuaggaauguuuaucguaug

SEQ ID NO: 8533 - RNA, 20 nt, Artificial Sequence
  SAMD9 targeting guide sequence portion
cuuuuggacuaggaauguuu

SEQ ID NO: 8534 - RNA, 20 nt, Artificial Sequence
  SAMD9 targeting guide sequence portion
gaauguuuaucguaugcuug

SEQ ID NO: 8535 - RNA, 20 nt, Artificial Sequence
  SAMD9 targeting guide sequence portion
gacaagcauacgauaaacau

SEQ ID NO: 8536 - RNA, 20 nt, Artificial Sequence
  SAMD9 targeting guide sequence portion
gacuaggaauguuuaucgua

SEQ ID NO: 8537 - RNA, 20 nt, Artificial Sequence
  SAMD9 targeting guide sequence portion
gcauacgauaaacauuccua

SEQ ID NO: 8538 - RNA, 20 nt, Artificial Sequence
  SAMD9 targeting guide sequence portion
ggaauguuuaucguaugcuu

SEQ ID NO: 8539 - RNA, 20 nt, Artificial Sequence
  SAMD9 targeting guide sequence portion
ggacaagcauacgauaaaca

SEQ ID NO: 8540 - RNA, 20 nt, Artificial Sequence
  SAMD9 targeting guide sequence portion
ggacuaggaauguuuaucgu

SEQ ID NO: 8541 - RNA, 20 nt, Artificial Sequence
  SAMD9 targeting guide sequence portion
gggacaagcauacgauaaac

SEQ ID NO: 8542 - RNA, 20 nt, Artificial Sequence
  SAMD9 targeting guide sequence portion
ggugggacaagcauacgaua

SEQ ID NO: 8543 - RNA, 20 nt, Artificial Sequence
  SAMD9 targeting guide sequence portion
guaugcuugucccaccauug

SEQ ID NO: 8544 - RNA, 20 nt, Artificial Sequence
  SAMD9 targeting guide sequence portion
gugggacaagcauacgauaa

SEQ ID NO: 8545 - RNA, 20 nt, Artificial Sequence
  SAMD9 targeting guide sequence portion
guuuaucguaugcuuguccc

SEQ ID NO: 8546 - RNA, 20 nt, Artificial Sequence
  SAMD9 targeting guide sequence portion
uacaauggugggacaagcau

SEQ ID NO: 8547 - RNA, 20 nt, Artificial Sequence
  SAMD9 targeting guide sequence portion
uacgauaaacauuccuaguc

SEQ ID NO: 8548 - RNA, 20 nt, Artificial Sequence
  SAMD9 targeting guide sequence portion
uaggaauguuuaucguaugc

SEQ ID NO: 8549 - RNA, 20 nt, Artificial Sequence
  SAMD9 targeting guide sequence portion
uaucguaugcuugucccacc

SEQ ID NO: 8550 - RNA, 20 nt, Artificial Sequence
  SAMD9 targeting guide sequence portion
ucguaugcuugucccaccau

SEQ ID NO: 8551 - RNA, 20 nt, Artificial Sequence
  SAMD9 targeting guide sequence portion
uggacuaggaauguuuaucg

SEQ ID NO: 8552 - RNA, 20 nt, Artificial Sequence
  SAMD9 targeting guide sequence portion
ugggacaagcauacgauaaa

SEQ ID NO: 8553 - RNA, 20 nt, Artificial Sequence
  SAMD9 targeting guide sequence portion
uggugggacaagcauacgau

SEQ ID NO: 8554 - RNA, 20 nt, Artificial Sequence
  SAMD9 targeting guide sequence portion
uguuuaucguaugcuugucc

SEQ ID NO: 8555 - RNA, 20 nt, Artificial Sequence
  SAMD9 targeting guide sequence portion
uuaucguaugcuugucccac

SEQ ID NO: 8556 - RNA, 20 nt, Artificial Sequence
  SAMD9 targeting guide sequence portion
uuggacuaggaauguuuauc

SEQ ID NO: 8557 - RNA, 20 nt, Artificial Sequence
  SAMD9 targeting guide sequence portion
uuuaucguaugcuuguccca

SEQ ID NO: 8558 - RNA, 20 nt, Artificial Sequence
  SAMD9 targeting guide sequence portion
uuuggacuaggaauguuuau

SEQ ID NO: 8559 - RNA, 20 nt, Artificial Sequence
  SAMD9 targeting guide sequence portion
uuuuggacuaggaauguuua

SEQ ID NO: 8560 - RNA, 21 nt, Artificial Sequence
  SAMD9 targeting guide sequence portion
aacuacaauggugggacaagc

SEQ ID NO: 8561 - RNA, 21 nt, Artificial Sequence
  SAMD9 targeting guide sequence portion
aagcauacgauaaacauuccu

SEQ ID NO: 8562 - RNA, 21 nt, Artificial Sequence
  SAMD9 targeting guide sequence portion
aauggugggacaagcauacga

SEQ ID NO: 8563 - RNA, 21 nt, Artificial Sequence
  SAMD9 targeting guide sequence portion
aauguuuaucguaugcuuguc

SEQ ID NO: 8564 - RNA, 21 nt, Artificial Sequence
  SAMD9 targeting guide sequence portion
acaagcauacgauaaacauuc

SEQ ID NO: 8565 - RNA, 21 nt, Artificial Sequence
  SAMD9 targeting guide sequence portion
acaauggugggacaagcauac

SEQ ID NO: 8566 - RNA, 21 nt, Artificial Sequence
  SAMD9 targeting guide sequence portion
acgauaaacauuccuagucca

SEQ ID NO: 8567 - RNA, 21 nt, Artificial Sequence
  SAMD9 targeting guide sequence portion
acuacaauggugggacaagca

SEQ ID NO: 8568 - RNA, 21 nt, Artificial Sequence
  SAMD9 targeting guide sequence portion
acuaggaauguuuaucguaug

SEQ ID NO: 8569 - RNA, 21 nt, Artificial Sequence
  SAMD9 targeting guide sequence portion
agcauacgauaaacauuccua

SEQ ID NO: 8570 - RNA, 21 nt, Artificial Sequence
  SAMD9 targeting guide sequence portion
aggaauguuuaucguaugcuu

SEQ ID NO: 8571 - RNA, 21 nt, Artificial Sequence
  SAMD9 targeting guide sequence portion
auacgauaaacauuccuaguc

SEQ ID NO: 8572 - RNA, 21 nt, Artificial Sequence
  SAMD9 targeting guide sequence portion
aucguaugcuugucccaccau

SEQ ID NO: 8573 - RNA, 21 nt, Artificial Sequence
  SAMD9 targeting guide sequence portion
auggugggacaagcauacgau

SEQ ID NO: 8574 - RNA, 21 nt, Artificial Sequence
  SAMD9 targeting guide sequence portion
auguuuaucguaugcuugucc

SEQ ID NO: 8575 - RNA, 21 nt, Artificial Sequence
  SAMD9 targeting guide sequence portion
caacuacaauggugggacaag

SEQ ID NO: 8576 - RNA, 21 nt, Artificial Sequence
  SAMD9 targeting guide sequence portion
caagcauacgauaaacauucc

SEQ ID NO: 8577 - RNA, 21 nt, Artificial Sequence
  SAMD9 targeting guide sequence portion
caauggugggacaagcauacg

SEQ ID NO: 8578 - RNA, 21 nt, Artificial Sequence
  SAMD9 targeting guide sequence portion
cauacgauaaacauuccuagu

SEQ ID NO: 8579 - RNA, 21 nt, Artificial Sequence
  SAMD9 targeting guide sequence portion
ccaacuacaauggugggacaa

SEQ ID NO: 8580 - RNA, 21 nt, Artificial Sequence
  SAMD9 targeting guide sequence portion
cccuuuuggacuaggaauguu

SEQ ID NO: 8581 - RNA, 21 nt, Artificial Sequence
  SAMD9 targeting guide sequence portion
ccuuuuggacuaggaauguuu

SEQ ID NO: 8582 - RNA, 21 nt, Artificial Sequence
  SAMD9 targeting guide sequence portion
cgauaaacauuccuaguccaa

SEQ ID NO: 8583 - RNA, 21 nt, Artificial Sequence
  SAMD9 targeting guide sequence portion
cguaugcuugucccaccauug

SEQ ID NO: 8584 - RNA, 21 nt, Artificial Sequence
  SAMD9 targeting guide sequence portion
cuacaauggugggacaagcau

SEQ ID NO: 8585 - RNA, 21 nt, Artificial Sequence
  SAMD9 targeting guide sequence portion
cuaggaauguuuaucguaugc

SEQ ID NO: 8586 - RNA, 21 nt, Artificial Sequence
  SAMD9 targeting guide sequence portion
cuuuuggacuaggaauguuua

SEQ ID NO: 8587 - RNA, 21 nt, Artificial Sequence
  SAMD9 targeting guide sequence portion
gaauguuuaucguaugcuugu

SEQ ID NO: 8588 - RNA, 21 nt, Artificial Sequence
  SAMD9 targeting guide sequence portion
gacaagcauacgauaaacauu

SEQ ID NO: 8589 - RNA, 21 nt, Artificial Sequence
  SAMD9 targeting guide sequence portion
gacuaggaauguuuaucguau

SEQ ID NO: 8590 - RNA, 21 nt, Artificial Sequence
  SAMD9 targeting guide sequence portion
gcauacgauaaacauuccuag

SEQ ID NO: 8591 - RNA, 21 nt, Artificial Sequence
  SAMD9 targeting guide sequence portion
ggaauguuuaucguaugcuug

SEQ ID NO: 8592 - RNA, 21 nt, Artificial Sequence
  SAMD9 targeting guide sequence portion
ggacaagcauacgauaaacau

SEQ ID NO: 8593 - RNA, 21 nt, Artificial Sequence
  SAMD9 targeting guide sequence portion
ggacuaggaauguuuaucgua

SEQ ID NO: 8594 - RNA, 21 nt, Artificial Sequence
  SAMD9 targeting guide sequence portion
gggacaagcauacgauaaaca

SEQ ID NO: 8595 - RNA, 21 nt, Artificial Sequence
  SAMD9 targeting guide sequence portion
ggugggacaagcauacgauaa

SEQ ID NO: 8596 - RNA, 21 nt, Artificial Sequence
  SAMD9 targeting guide sequence portion
guaugcuugucccaccauugu

SEQ ID NO: 8597 - RNA, 21 nt, Artificial Sequence
  SAMD9 targeting guide sequence portion
gugggacaagcauacgauaaa

SEQ ID NO: 8598 - RNA, 21 nt, Artificial Sequence
  SAMD9 targeting guide sequence portion
guuuaucguaugcuuguccca

SEQ ID NO: 8599 - RNA, 21 nt, Artificial Sequence
  SAMD9 targeting guide sequence portion
uacaauggugggacaagcaua

SEQ ID NO: 8600 - RNA, 21 nt, Artificial Sequence
  SAMD9 targeting guide sequence portion
uacgauaaacauuccuagucc

SEQ ID NO: 8601 - RNA, 21 nt, Artificial Sequence
  SAMD9 targeting guide sequence portion
uaggaauguuuaucguaugcu

SEQ ID NO: 8602 - RNA, 21 nt, Artificial Sequence
  SAMD9 targeting guide sequence portion
uaucguaugcuugucccacca

SEQ ID NO: 8603 - RNA, 21 nt, Artificial Sequence
  SAMD9 targeting guide sequence portion
ucccuuuuggacuaggaaugu

SEQ ID NO: 8604 - RNA, 21 nt, Artificial Sequence
  SAMD9 targeting guide sequence portion
ucguaugcuugucccaccauu

SEQ ID NO: 8605 - RNA, 21 nt, Artificial Sequence
  SAMD9 targeting guide sequence portion
uggacuaggaauguuuaucgu

SEQ ID NO: 8606 - RNA, 21 nt, Artificial Sequence
  SAMD9 targeting guide sequence portion
ugggacaagcauacgauaaac

SEQ ID NO: 8607 - RNA, 21 nt, Artificial Sequence
  SAMD9 targeting guide sequence portion
uggugggacaagcauacgaua

SEQ ID NO: 8608 - RNA, 21 nt, Artificial Sequence
  SAMD9 targeting guide sequence portion
uguuuaucguaugcuuguccc

SEQ ID NO: 8609 - RNA, 21 nt, Artificial Sequence
  SAMD9 targeting guide sequence portion
uuaucguaugcuugucccacc

SEQ ID NO: 8610 - RNA, 21 nt, Artificial Sequence
  SAMD9 targeting guide sequence portion
uuggacuaggaauguuuaucg

SEQ ID NO: 8611 - RNA, 21 nt, Artificial Sequence
  SAMD9 targeting guide sequence portion
uuuaucguaugcuugucccac

SEQ ID NO: 8612 - RNA, 21 nt, Artificial Sequence
  SAMD9 targeting guide sequence portion
uuuggacuaggaauguuuauc

SEQ ID NO: 8613 - RNA, 21 nt, Artificial Sequence
  SAMD9 targeting guide sequence portion
uuuuggacuaggaauguuuau

SEQ ID NO: 8614 - RNA, 22 nt, Artificial Sequence
  SAMD9 targeting guide sequence portion
aacuacaauggugggacaagca

SEQ ID NO: 8615 - RNA, 22 nt, Artificial Sequence
  SAMD9 targeting guide sequence portion
aagcauacgauaaacauuccua

SEQ ID NO: 8616 - RNA, 22 nt, Artificial Sequence
  SAMD9 targeting guide sequence portion
aauggugggacaagcauacgau

SEQ ID NO: 8617 - RNA, 22 nt, Artificial Sequence
  SAMD9 targeting guide sequence portion
aauguuuaucguaugcuugucc

SEQ ID NO: 8618 - RNA, 22 nt, Artificial Sequence
  SAMD9 targeting guide sequence portion
acaagcauacgauaaacauucc

SEQ ID NO: 8619 - RNA, 22 nt, Artificial Sequence
  SAMD9 targeting guide sequence portion
acaauggugggacaagcauacg

SEQ ID NO: 8620 - RNA, 22 nt, Artificial Sequence
  SAMD9 targeting guide sequence portion
acgauaaacauuccuaguccaa

SEQ ID NO: 8621 - RNA, 22 nt, Artificial Sequence
  SAMD9 targeting guide sequence portion
acuacaauggugggacaagcau

SEQ ID NO: 8622 - RNA, 22 nt, Artificial Sequence
  SAMD9 targeting guide sequence portion
acuaggaauguuuaucguaugc

SEQ ID NO: 8623 - RNA, 22 nt, Artificial Sequence
  SAMD9 targeting guide sequence portion
agcauacgauaaacauuccuag

SEQ ID NO: 8624 - RNA, 22 nt, Artificial Sequence
  SAMD9 targeting guide sequence portion
aggaauguuuaucguaugcuug

SEQ ID NO: 8625 - RNA, 22 nt, Artificial Sequence
  SAMD9 targeting guide sequence portion
auacgauaaacauuccuagucc

SEQ ID NO: 8626 - RNA, 22 nt, Artificial Sequence
  SAMD9 targeting guide sequence portion
aucguaugcuugucccaccauu

SEQ ID NO: 8627 - RNA, 22 nt, Artificial Sequence
  SAMD9 targeting guide sequence portion
auggugggacaagcauacgaua

SEQ ID NO: 8628 - RNA, 22 nt, Artificial Sequence
  SAMD9 targeting guide sequence portion
auguuuaucguaugcuuguccc

SEQ ID NO: 8629 - RNA, 22 nt, Artificial Sequence
  SAMD9 targeting guide sequence portion
caacuacaauggugggacaagc

SEQ ID NO: 8630 - RNA, 22 nt, Artificial Sequence
  SAMD9 targeting guide sequence portion
caagcauacgauaaacauuccu

SEQ ID NO: 8631 - RNA, 22 nt, Artificial Sequence
  SAMD9 targeting guide sequence portion
caauggugggacaagcauacga

SEQ ID NO: 8632 - RNA, 22 nt, Artificial Sequence
  SAMD9 targeting guide sequence portion
cauacgauaaacauuccuaguc

SEQ ID NO: 8633 - RNA, 22 nt, Artificial Sequence
  SAMD9 targeting guide sequence portion
ccaacuacaauggugggacaag

SEQ ID NO: 8634 - RNA, 22 nt, Artificial Sequence
  SAMD9 targeting guide sequence portion
cccuuuuggacuaggaauguuu

SEQ ID NO: 8635 - RNA, 22 nt, Artificial Sequence
  SAMD9 targeting guide sequence portion
ccuuuuggacuaggaauguuua

SEQ ID NO: 8636 - RNA, 22 nt, Artificial Sequence
  SAMD9 targeting guide sequence portion
cgauaaacauuccuaguccaaa

SEQ ID NO: 8637 - RNA, 22 nt, Artificial Sequence
  SAMD9 targeting guide sequence portion
cguaugcuugucccaccauugu

SEQ ID NO: 8638 - RNA, 22 nt, Artificial Sequence
  SAMD9 targeting guide sequence portion
cuacaauggugggacaagcaua

SEQ ID NO: 8639 - RNA, 22 nt, Artificial Sequence
  SAMD9 targeting guide sequence portion
cuaggaauguuuaucguaugcu

SEQ ID NO: 8640 - RNA, 22 nt, Artificial Sequence
  SAMD9 targeting guide sequence portion
cuuuuggacuaggaauguuuau

SEQ ID NO: 8641 - RNA, 22 nt, Artificial Sequence
  SAMD9 targeting guide sequence portion
gaauguuuaucguaugcuuguc

SEQ ID NO: 8642 - RNA, 22 nt, Artificial Sequence
  SAMD9 targeting guide sequence portion
gacaagcauacgauaaacauuc

SEQ ID NO: 8643 - RNA, 22 nt, Artificial Sequence
  SAMD9 targeting guide sequence portion
gacuaggaauguuuaucguaug

SEQ ID NO: 8644 - RNA, 22 nt, Artificial Sequence
  SAMD9 targeting guide sequence portion
gcauacgauaaacauuccuagu

SEQ ID NO: 8645 - RNA, 22 nt, Artificial Sequence
  SAMD9 targeting guide sequence portion
ggaauguuuaucguaugcuugu

SEQ ID NO: 8646 - RNA, 22 nt, Artificial Sequence
  SAMD9 targeting guide sequence portion
ggacaagcauacgauaaacauu

SEQ ID NO: 8647 - RNA, 22 nt, Artificial Sequence
  SAMD9 targeting guide sequence portion
ggacuaggaauguuuaucguau

SEQ ID NO: 8648 - RNA, 22 nt, Artificial Sequence
  SAMD9 targeting guide sequence portion
gggacaagcauacgauaaacau

SEQ ID NO: 8649 - RNA, 22 nt, Artificial Sequence
  SAMD9 targeting guide sequence portion
ggugggacaagcauacgauaaa

SEQ ID NO: 8650 - RNA, 22 nt, Artificial Sequence
  SAMD9 targeting guide sequence portion
guaugcuugucccaccauugua

SEQ ID NO: 8651 - RNA, 22 nt, Artificial Sequence
  SAMD9 targeting guide sequence portion
gugggacaagcauacgauaaac

SEQ ID NO: 8652 - RNA, 22 nt, Artificial Sequence
  SAMD9 targeting guide sequence portion
guuuaucguaugcuugucccac

SEQ ID NO: 8653 - RNA, 22 nt, Artificial Sequence
  SAMD9 targeting guide sequence portion
uacaauggugggacaagcauac

SEQ ID NO: 8654 - RNA, 22 nt, Artificial Sequence
  SAMD9 targeting guide sequence portion
uacgauaaacauuccuagucca

SEQ ID NO: 8655 - RNA, 22 nt, Artificial Sequence
  SAMD9 targeting guide sequence portion
uaggaauguuuaucguaugcuu

SEQ ID NO: 8656 - RNA, 22 nt, Artificial Sequence
  SAMD9 targeting guide sequence portion
uaucguaugcuugucccaccau

SEQ ID NO: 8657 - RNA, 22 nt, Artificial Sequence
  SAMD9 targeting guide sequence portion
uccaacuacaauggugggacaa

SEQ ID NO: 8658 - RNA, 22 nt, Artificial Sequence
  SAMD9 targeting guide sequence portion
ucccuuuuggacuaggaauguu

SEQ ID NO: 8659 - RNA, 22 nt, Artificial Sequence
  SAMD9 targeting guide sequence portion
ucguaugcuugucccaccauug

SEQ ID NO: 8660 - RNA, 22 nt, Artificial Sequence
  SAMD9 targeting guide sequence portion
uggacuaggaauguuuaucgua

SEQ ID NO: 8661 - RNA, 22 nt, Artificial Sequence
  SAMD9 targeting guide sequence portion
ugggacaagcauacgauaaaca

SEQ ID NO: 8662 - RNA, 22 nt, Artificial Sequence
  SAMD9 targeting guide sequence portion
uggugggacaagcauacgauaa

SEQ ID NO: 8663 - RNA, 22 nt, Artificial Sequence
  SAMD9 targeting guide sequence portion
uguuuaucguaugcuuguccca

SEQ ID NO: 8664 - RNA, 22 nt, Artificial Sequence
  SAMD9 targeting guide sequence portion
uuaucguaugcuugucccacca

SEQ ID NO: 8665 - RNA, 22 nt, Artificial Sequence
  SAMD9 targeting guide sequence portion
uucccuuuuggacuaggaaugu

SEQ ID NO: 8666 - RNA, 22 nt, Artificial Sequence
  SAMD9 targeting guide sequence portion
uuggacuaggaauguuuaucgu

SEQ ID NO: 8667 - RNA, 22 nt, Artificial Sequence
  SAMD9 targeting guide sequence portion
uuuaucguaugcuugucccacc

SEQ ID NO: 8668 - RNA, 22 nt, Artificial Sequence
  SAMD9 targeting guide sequence portion
uuuggacuaggaauguuuaucg

SEQ ID NO: 8669 - RNA, 22 nt, Artificial Sequence
  SAMD9 targeting guide sequence portion
uuuuggacuaggaauguuuauc

SEQ ID NO: 8670 - RNA, 20 nt, Artificial Sequence
  SAMD9 targeting guide sequence portion
aagcauaugauaaacauucc

SEQ ID NO: 8671 - RNA, 20 nt, Artificial Sequence
  SAMD9 targeting guide sequence portion
aauggugggacaagcauaug

SEQ ID NO: 8672 - RNA, 20 nt, Artificial Sequence
  SAMD9 targeting guide sequence portion
aauguuuaucauaugcuugu

SEQ ID NO: 8673 - RNA, 20 nt, Artificial Sequence
  SAMD9 targeting guide sequence portion
acaagcauaugauaaacauu

SEQ ID NO: 8674 - RNA, 20 nt, Artificial Sequence
  SAMD9 targeting guide sequence portion
acuaggaauguuuaucauau

SEQ ID NO: 8675 - RNA, 20 nt, Artificial Sequence
  SAMD9 targeting guide sequence portion
agcauaugauaaacauuccu

SEQ ID NO: 8676 - RNA, 20 nt, Artificial Sequence
  SAMD9 targeting guide sequence portion
aggaauguuuaucauaugcu

SEQ ID NO: 8677 - RNA, 20 nt, Artificial Sequence
  SAMD9 targeting guide sequence portion
auaugauaaacauuccuagu

SEQ ID NO: 8678 - RNA, 20 nt, Artificial Sequence
  SAMD9 targeting guide sequence portion
auaugcuugucccaccauug

SEQ ID NO: 8679 - RNA, 20 nt, Artificial Sequence
  SAMD9 targeting guide sequence portion
aucauaugcuugucccacca

SEQ ID NO: 8680 - RNA, 20 nt, Artificial Sequence
  SAMD9 targeting guide sequence portion
augauaaacauuccuagucc

SEQ ID NO: 8681 - RNA, 20 nt, Artificial Sequence
  SAMD9 targeting guide sequence portion
auggugggacaagcauauga

SEQ ID NO: 8682 - RNA, 20 nt, Artificial Sequence
  SAMD9 targeting guide sequence portion
auguuuaucauaugcuuguc

SEQ ID NO: 8683 - RNA, 20 nt, Artificial Sequence
  SAMD9 targeting guide sequence portion
caagcauaugauaaacauuc

SEQ ID NO: 8684 - RNA, 20 nt, Artificial Sequence
  SAMD9 targeting guide sequence portion
caauggugggacaagcauau

SEQ ID NO: 8685 - RNA, 20 nt, Artificial Sequence
  SAMD9 targeting guide sequence portion
cauaugauaaacauuccuag

SEQ ID NO: 8686 - RNA, 20 nt, Artificial Sequence
  SAMD9 targeting guide sequence portion
cauaugcuugucccaccauu

SEQ ID NO: 8687 - RNA, 20 nt, Artificial Sequence
  SAMD9 targeting guide sequence portion
cuaggaauguuuaucauaug

SEQ ID NO: 8688 - RNA, 20 nt, Artificial Sequence
  SAMD9 targeting guide sequence portion
gaauguuuaucauaugcuug

SEQ ID NO: 8689 - RNA, 20 nt, Artificial Sequence
  SAMD9 targeting guide sequence portion
gacaagcauaugauaaacau

SEQ ID NO: 8690 - RNA, 20 nt, Artificial Sequence
  SAMD9 targeting guide sequence portion
gacuaggaauguuuaucaua

SEQ ID NO: 8691 - RNA, 20 nt, Artificial Sequence
  SAMD9 targeting guide sequence portion
gcauaugauaaacauuccua

SEQ ID NO: 8692 - RNA, 20 nt, Artificial Sequence
  SAMD9 targeting guide sequence portion
ggaauguuuaucauaugcuu

SEQ ID NO: 8693 - RNA, 20 nt, Artificial Sequence
  SAMD9 targeting guide sequence portion
ggacaagcauaugauaaaca

SEQ ID NO: 8694 - RNA, 20 nt, Artificial Sequence
  SAMD9 targeting guide sequence portion
ggacuaggaauguuuaucau

SEQ ID NO: 8695 - RNA, 20 nt, Artificial Sequence
  SAMD9 targeting guide sequence portion
gggacaagcauaugauaaac

SEQ ID NO: 8696 - RNA, 20 nt, Artificial Sequence
  SAMD9 targeting guide sequence portion
ggugggacaagcauaugaua

SEQ ID NO: 8697 - RNA, 20 nt, Artificial Sequence
  SAMD9 targeting guide sequence portion
gugggacaagcauaugauaa

SEQ ID NO: 8698 - RNA, 20 nt, Artificial Sequence
  SAMD9 targeting guide sequence portion
guuuaucauaugcuuguccc

SEQ ID NO: 8699 - RNA, 20 nt, Artificial Sequence
  SAMD9 targeting guide sequence portion
uaggaauguuuaucauaugc

SEQ ID NO: 8700 - RNA, 20 nt, Artificial Sequence
  SAMD9 targeting guide sequence portion
uaucauaugcuugucccacc

SEQ ID NO: 8701 - RNA, 20 nt, Artificial Sequence
  SAMD9 targeting guide sequence portion
uaugauaaacauuccuaguc

SEQ ID NO: 8702 - RNA, 20 nt, Artificial Sequence
  SAMD9 targeting guide sequence portion
ucauaugcuugucccaccau

SEQ ID NO: 8703 - RNA, 20 nt, Artificial Sequence
  SAMD9 targeting guide sequence portion
ugauaaacauuccuagucca

SEQ ID NO: 8704 - RNA, 20 nt, Artificial Sequence
  SAMD9 targeting guide sequence portion
uggacuaggaauguuuauca

SEQ ID NO: 8705 - RNA, 20 nt, Artificial Sequence
  SAMD9 targeting guide sequence portion
ugggacaagcauaugauaaa

SEQ ID NO: 8706 - RNA, 20 nt, Artificial Sequence
  SAMD9 targeting guide sequence portion
uggugggacaagcauaugau

SEQ ID NO: 8707 - RNA, 20 nt, Artificial Sequence
  SAMD9 targeting guide sequence portion
uguuuaucauaugcuugucc

SEQ ID NO: 8708 - RNA, 20 nt, Artificial Sequence
  SAMD9 targeting guide sequence portion
uuaucauaugcuugucccac

SEQ ID NO: 8709 - RNA, 20 nt, Artificial Sequence
  SAMD9 targeting guide sequence portion
uuuaucauaugcuuguccca

SEQ ID NO: 8710 - RNA, 21 nt, Artificial Sequence
  SAMD9 targeting guide sequence portion
aagcauaugauaaacauuccu

SEQ ID NO: 8711 - RNA, 21 nt, Artificial Sequence
  SAMD9 targeting guide sequence portion
aauggugggacaagcauauga

SEQ ID NO: 8712 - RNA, 21 nt, Artificial Sequence
  SAMD9 targeting guide sequence portion
aauguuuaucauaugcuuguc

SEQ ID NO: 8713 - RNA, 21 nt, Artificial Sequence
  SAMD9 targeting guide sequence portion
acaagcauaugauaaacauuc

SEQ ID NO: 8714 - RNA, 21 nt, Artificial Sequence
  SAMD9 targeting guide sequence portion
acaauggugggacaagcauau

SEQ ID NO: 8715 - RNA, 21 nt, Artificial Sequence
  SAMD9 targeting guide sequence portion
acuaggaauguuuaucauaug

SEQ ID NO: 8716 - RNA, 21 nt, Artificial Sequence
  SAMD9 targeting guide sequence portion
agcauaugauaaacauuccua

SEQ ID NO: 8717 - RNA, 21 nt, Artificial Sequence
  SAMD9 targeting guide sequence portion
aggaauguuuaucauaugcuu

SEQ ID NO: 8718 - RNA, 21 nt, Artificial Sequence
  SAMD9 targeting guide sequence portion
auaugauaaacauuccuaguc

SEQ ID NO: 8719 - RNA, 21 nt, Artificial Sequence
  SAMD9 targeting guide sequence portion
auaugcuugucccaccauugu

SEQ ID NO: 8720 - RNA, 21 nt, Artificial Sequence
  SAMD9 targeting guide sequence portion
aucauaugcuugucccaccau

SEQ ID NO: 8721 - RNA, 21 nt, Artificial Sequence
  SAMD9 targeting guide sequence portion
augauaaacauuccuagucca

SEQ ID NO: 8722 - RNA, 21 nt, Artificial Sequence
  SAMD9 targeting guide sequence portion
auggugggacaagcauaugau

SEQ ID NO: 8723 - RNA, 21 nt, Artificial Sequence
  SAMD9 targeting guide sequence portion
auguuuaucauaugcuugucc

SEQ ID NO: 8724 - RNA, 21 nt, Artificial Sequence
  SAMD9 targeting guide sequence portion
caagcauaugauaaacauucc

SEQ ID NO: 8725 - RNA, 21 nt, Artificial Sequence
  SAMD9 targeting guide sequence portion
caauggugggacaagcauaug

SEQ ID NO: 8726 - RNA, 21 nt, Artificial Sequence
  SAMD9 targeting guide sequence portion
cauaugauaaacauuccuagu

SEQ ID NO: 8727 - RNA, 21 nt, Artificial Sequence
  SAMD9 targeting guide sequence portion
cauaugcuugucccaccauug

SEQ ID NO: 8728 - RNA, 21 nt, Artificial Sequence
  SAMD9 targeting guide sequence portion
cuaggaauguuuaucauaugc

SEQ ID NO: 8729 - RNA, 21 nt, Artificial Sequence
  SAMD9 targeting guide sequence portion
gaauguuuaucauaugcuugu

SEQ ID NO: 8730 - RNA, 21 nt, Artificial Sequence
  SAMD9 targeting guide sequence portion
gacaagcauaugauaaacauu

SEQ ID NO: 8731 - RNA, 21 nt, Artificial Sequence
  SAMD9 targeting guide sequence portion
gacuaggaauguuuaucauau

SEQ ID NO: 8732 - RNA, 21 nt, Artificial Sequence
  SAMD9 targeting guide sequence portion
gcauaugauaaacauuccuag

SEQ ID NO: 8733 - RNA, 21 nt, Artificial Sequence
  SAMD9 targeting guide sequence portion
ggaauguuuaucauaugcuug

SEQ ID NO: 8734 - RNA, 21 nt, Artificial Sequence
  SAMD9 targeting guide sequence portion
ggacaagcauaugauaaacau

SEQ ID NO: 8735 - RNA, 21 nt, Artificial Sequence
  SAMD9 targeting guide sequence portion
ggacuaggaauguuuaucaua

SEQ ID NO: 8736 - RNA, 21 nt, Artificial Sequence
  SAMD9 targeting guide sequence portion
gggacaagcauaugauaaaca

SEQ ID NO: 8737 - RNA, 21 nt, Artificial Sequence
  SAMD9 targeting guide sequence portion
ggugggacaagcauaugauaa

SEQ ID NO: 8738 - RNA, 21 nt, Artificial Sequence
  SAMD9 targeting guide sequence portion
gugggacaagcauaugauaaa

SEQ ID NO: 8739 - RNA, 21 nt, Artificial Sequence
  SAMD9 targeting guide sequence portion
guuuaucauaugcuuguccca

SEQ ID NO: 8740 - RNA, 21 nt, Artificial Sequence
  SAMD9 targeting guide sequence portion
uaggaauguuuaucauaugcu

SEQ ID NO: 8741 - RNA, 21 nt, Artificial Sequence
  SAMD9 targeting guide sequence portion
uaucauaugcuugucccacca

SEQ ID NO: 8742 - RNA, 21 nt, Artificial Sequence
  SAMD9 targeting guide sequence portion
uaugauaaacauuccuagucc

SEQ ID NO: 8743 - RNA, 21 nt, Artificial Sequence
  SAMD9 targeting guide sequence portion
ucauaugcuugucccaccauu

SEQ ID NO: 8744 - RNA, 21 nt, Artificial Sequence
  SAMD9 targeting guide sequence portion
ugauaaacauuccuaguccaa

SEQ ID NO: 8745 - RNA, 21 nt, Artificial Sequence
  SAMD9 targeting guide sequence portion
uggacuaggaauguuuaucau

SEQ ID NO: 8746 - RNA, 21 nt, Artificial Sequence
  SAMD9 targeting guide sequence portion
ugggacaagcauaugauaaac

SEQ ID NO: 8747 - RNA, 21 nt, Artificial Sequence
  SAMD9 targeting guide sequence portion
uggugggacaagcauaugaua

SEQ ID NO: 8748 - RNA, 21 nt, Artificial Sequence
  SAMD9 targeting guide sequence portion
uguuuaucauaugcuuguccc

SEQ ID NO: 8749 - RNA, 21 nt, Artificial Sequence
  SAMD9 targeting guide sequence portion
uuaucauaugcuugucccacc

SEQ ID NO: 8750 - RNA, 21 nt, Artificial Sequence
  SAMD9 targeting guide sequence portion
uuggacuaggaauguuuauca

SEQ ID NO: 8751 - RNA, 21 nt, Artificial Sequence
  SAMD9 targeting guide sequence portion
uuuaucauaugcuugucccac

SEQ ID NO: 8752 - RNA, 22 nt, Artificial Sequence
  SAMD9 targeting guide sequence portion
aagcauaugauaaacauuccua

SEQ ID NO: 8753 - RNA, 22 nt, Artificial Sequence
  SAMD9 targeting guide sequence portion
aauggugggacaagcauaugau

SEQ ID NO: 8754 - RNA, 22 nt, Artificial Sequence
  SAMD9 targeting guide sequence portion
aauguuuaucauaugcuugucc

SEQ ID NO: 8755 - RNA, 22 nt, Artificial Sequence
  SAMD9 targeting guide sequence portion
acaagcauaugauaaacauucc

SEQ ID NO: 8756 - RNA, 22 nt, Artificial Sequence
  SAMD9 targeting guide sequence portion
acaauggugggacaagcauaug

SEQ ID NO: 8757 - RNA, 22 nt, Artificial Sequence
  SAMD9 targeting guide sequence portion
acuaggaauguuuaucauaugc

SEQ ID NO: 8758 - RNA, 22 nt, Artificial Sequence
  SAMD9 targeting guide sequence portion
agcauaugauaaacauuccuag

SEQ ID NO: 8759 - RNA, 22 nt, Artificial Sequence
  SAMD9 targeting guide sequence portion
aggaauguuuaucauaugcuug

SEQ ID NO: 8760 - RNA, 22 nt, Artificial Sequence
  SAMD9 targeting guide sequence portion
auaugauaaacauuccuagucc

SEQ ID NO: 8761 - RNA, 22 nt, Artificial Sequence
  SAMD9 targeting guide sequence portion
auaugcuugucccaccauugua

SEQ ID NO: 8762 - RNA, 22 nt, Artificial Sequence
  SAMD9 targeting guide sequence portion
aucauaugcuugucccaccauu

SEQ ID NO: 8763 - RNA, 22 nt, Artificial Sequence
  SAMD9 targeting guide sequence portion
augauaaacauuccuaguccaa

SEQ ID NO: 8764 - RNA, 22 nt, Artificial Sequence
  SAMD9 targeting guide sequence portion
auggugggacaagcauaugaua

SEQ ID NO: 8765 - RNA, 22 nt, Artificial Sequence
  SAMD9 targeting guide sequence portion
auguuuaucauaugcuuguccc

SEQ ID NO: 8766 - RNA, 22 nt, Artificial Sequence
  SAMD9 targeting guide sequence portion
caagcauaugauaaacauuccu

SEQ ID NO: 8767 - RNA, 22 nt, Artificial Sequence
  SAMD9 targeting guide sequence portion
caauggugggacaagcauauga

SEQ ID NO: 8768 - RNA, 22 nt, Artificial Sequence
  SAMD9 targeting guide sequence portion
cauaugauaaacauuccuaguc

SEQ ID NO: 8769 - RNA, 22 nt, Artificial Sequence
  SAMD9 targeting guide sequence portion
cauaugcuugucccaccauugu

SEQ ID NO: 8770 - RNA, 22 nt, Artificial Sequence
  SAMD9 targeting guide sequence portion
cuaggaauguuuaucauaugcu

SEQ ID NO: 8771 - RNA, 22 nt, Artificial Sequence
  SAMD9 targeting guide sequence portion
gaauguuuaucauaugcuuguc

SEQ ID NO: 8772 - RNA, 22 nt, Artificial Sequence
  SAMD9 targeting guide sequence portion
gacaagcauaugauaaacauuc

SEQ ID NO: 8773 - RNA, 22 nt, Artificial Sequence
  SAMD9 targeting guide sequence portion
gacuaggaauguuuaucauaug

SEQ ID NO: 8774 - RNA, 22 nt, Artificial Sequence
  SAMD9 targeting guide sequence portion
gcauaugauaaacauuccuagu

SEQ ID NO: 8775 - RNA, 22 nt, Artificial Sequence
  SAMD9 targeting guide sequence portion
ggaauguuuaucauaugcuugu

SEQ ID NO: 8776 - RNA, 22 nt, Artificial Sequence
  SAMD9 targeting guide sequence portion
ggacaagcauaugauaaacauu

SEQ ID NO: 8777 - RNA, 22 nt, Artificial Sequence
  SAMD9 targeting guide sequence portion
ggacuaggaauguuuaucauau

SEQ ID NO: 8778 - RNA, 22 nt, Artificial Sequence
  SAMD9 targeting guide sequence portion
gggacaagcauaugauaaacau

SEQ ID NO: 8779 - RNA, 22 nt, Artificial Sequence
  SAMD9 targeting guide sequence portion
ggugggacaagcauaugauaaa

SEQ ID NO: 8780 - RNA, 22 nt, Artificial Sequence
  SAMD9 targeting guide sequence portion
gugggacaagcauaugauaaac

SEQ ID NO: 8781 - RNA, 22 nt, Artificial Sequence
  SAMD9 targeting guide sequence portion
guuuaucauaugcuugucccac

SEQ ID NO: 8782 - RNA, 22 nt, Artificial Sequence
  SAMD9 targeting guide sequence portion
uacaauggugggacaagcauau

SEQ ID NO: 8783 - RNA, 22 nt, Artificial Sequence
  SAMD9 targeting guide sequence portion
uaggaauguuuaucauaugcuu

SEQ ID NO: 8784 - RNA, 22 nt, Artificial Sequence
  SAMD9 targeting guide sequence portion
uaucauaugcuugucccaccau

SEQ ID NO: 8785 - RNA, 22 nt, Artificial Sequence
  SAMD9 targeting guide sequence portion
uaugauaaacauuccuagucca

SEQ ID NO: 8786 - RNA, 22 nt, Artificial Sequence
  SAMD9 targeting guide sequence portion
ucauaugcuugucccaccauug

SEQ ID NO: 8787 - RNA, 22 nt, Artificial Sequence
  SAMD9 targeting guide sequence portion
ugauaaacauuccuaguccaaa

SEQ ID NO: 8788 - RNA, 22 nt, Artificial Sequence
  SAMD9 targeting guide sequence portion
uggacuaggaauguuuaucaua

SEQ ID NO: 8789 - RNA, 22 nt, Artificial Sequence
  SAMD9 targeting guide sequence portion
ugggacaagcauaugauaaaca

SEQ ID NO: 8790 - RNA, 22 nt, Artificial Sequence
  SAMD9 targeting guide sequence portion
uggugggacaagcauaugauaa

SEQ ID NO: 8791 - RNA, 22 nt, Artificial Sequence
  SAMD9 targeting guide sequence portion
uguuuaucauaugcuuguccca

SEQ ID NO: 8792 - RNA, 22 nt, Artificial Sequence
  SAMD9 targeting guide sequence portion
uuaucauaugcuugucccacca

SEQ ID NO: 8793 - RNA, 22 nt, Artificial Sequence
  SAMD9 targeting guide sequence portion
uuggacuaggaauguuuaucau

SEQ ID NO: 8794 - RNA, 22 nt, Artificial Sequence
  SAMD9 targeting guide sequence portion
uuuaucauaugcuugucccacc

SEQ ID NO: 8795 - RNA, 22 nt, Artificial Sequence
  SAMD9 targeting guide sequence portion
uuuggacuaggaauguuuauca

SEQ ID NO: 8796 - RNA, 20 nt, Artificial Sequence
  SAMD9 targeting guide sequence portion
aaaauguaaaagaaauccuc

SEQ ID NO: 8797 - RNA, 20 nt, Artificial Sequence
  SAMD9 targeting guide sequence portion
aaauguaaaagaaauccucu

SEQ ID NO: 8798 - RNA, 20 nt, Artificial Sequence
  SAMD9 targeting guide sequence portion
aauguaaaagaaauccucug

SEQ ID NO: 8799 - RNA, 20 nt, Artificial Sequence
  SAMD9 targeting guide sequence portion
acauuuuaaaaauugagcug

SEQ ID NO: 8800 - RNA, 20 nt, Artificial Sequence
  SAMD9 targeting guide sequence portion
accagaggauuucuuuuaca

SEQ ID NO: 8801 - RNA, 20 nt, Artificial Sequence
  SAMD9 targeting guide sequence portion
agaggauuucuuuuacauuu

SEQ ID NO: 8802 - RNA, 20 nt, Artificial Sequence
  SAMD9 targeting guide sequence portion
agcucaauuuuuaaaaugua

SEQ ID NO: 8803 - RNA, 20 nt, Artificial Sequence
  SAMD9 targeting guide sequence portion
aggauuucuuuuacauuuua

SEQ ID NO: 8804 - RNA, 20 nt, Artificial Sequence
  SAMD9 targeting guide sequence portion
auguaaaagaaauccucugg

SEQ ID NO: 8805 - RNA, 20 nt, Artificial Sequence
  SAMD9 targeting guide sequence portion
auuucagcucaauuuuuaaa

SEQ ID NO: 8806 - RNA, 20 nt, Artificial Sequence
  SAMD9 targeting guide sequence portion
cagaggauuucuuuuacauu

SEQ ID NO: 8807 - RNA, 20 nt, Artificial Sequence
  SAMD9 targeting guide sequence portion
cagcucaauuuuuaaaaugu

SEQ ID NO: 8808 - RNA, 20 nt, Artificial Sequence
  SAMD9 targeting guide sequence portion
cauuucagcucaauuuuuaa

SEQ ID NO: 8809 - RNA, 20 nt, Artificial Sequence
  SAMD9 targeting guide sequence portion
cauuuuaaaaauugagcuga

SEQ ID NO: 8810 - RNA, 20 nt, Artificial Sequence
  SAMD9 targeting guide sequence portion
ccagaggauuucuuuuacau

SEQ ID NO: 8811 - RNA, 20 nt, Artificial Sequence
  SAMD9 targeting guide sequence portion
ccguuugaccagaggauuuc

SEQ ID NO: 8812 - RNA, 20 nt, Artificial Sequence
  SAMD9 targeting guide sequence portion
cguuugaccagaggauuucu

SEQ ID NO: 8813 - RNA, 20 nt, Artificial Sequence
  SAMD9 targeting guide sequence portion
gaccagaggauuucuuuuac

SEQ ID NO: 8814 - RNA, 20 nt, Artificial Sequence
  SAMD9 targeting guide sequence portion
gaggauuucuuuuacauuuu

SEQ ID NO: 8815 - RNA, 20 nt, Artificial Sequence
  SAMD9 targeting guide sequence portion
gcucaauuuuuaaaauguaa

SEQ ID NO: 8816 - RNA, 20 nt, Artificial Sequence
  SAMD9 targeting guide sequence portion
ggauuucuuuuacauuuuaa

SEQ ID NO: 8817 - RNA, 20 nt, Artificial Sequence
  SAMD9 targeting guide sequence portion
guaaaagaaauccucugguc

SEQ ID NO: 8818 - RNA, 20 nt, Artificial Sequence
  SAMD9 targeting guide sequence portion
guuugaccagaggauuucuu

SEQ ID NO: 8819 - RNA, 20 nt, Artificial Sequence
  SAMD9 targeting guide sequence portion
uaaaauguaaaagaaauccu

SEQ ID NO: 8820 - RNA, 20 nt, Artificial Sequence
  SAMD9 targeting guide sequence portion
uacauuuuaaaaauugagcu

SEQ ID NO: 8821 - RNA, 20 nt, Artificial Sequence
  SAMD9 targeting guide sequence portion
ucagcucaauuuuuaaaaug

SEQ ID NO: 8822 - RNA, 20 nt, Artificial Sequence
  SAMD9 targeting guide sequence portion
ucauuucagcucaauuuuua

SEQ ID NO: 8823 - RNA, 20 nt, Artificial Sequence
  SAMD9 targeting guide sequence portion
ugaccagaggauuucuuuua

SEQ ID NO: 8824 - RNA, 20 nt, Artificial Sequence
  SAMD9 targeting guide sequence portion
uguaaaagaaauccucuggu

SEQ ID NO: 8825 - RNA, 20 nt, Artificial Sequence
  SAMD9 targeting guide sequence portion
uuaaaauguaaaagaaaucc

SEQ ID NO: 8826 - RNA, 20 nt, Artificial Sequence
  SAMD9 targeting guide sequence portion
uuacauuuuaaaaauugagc

SEQ ID NO: 8827 - RNA, 20 nt, Artificial Sequence
  SAMD9 targeting guide sequence portion
uucagcucaauuuuuaaaau

SEQ ID NO: 8828 - RNA, 20 nt, Artificial Sequence
  SAMD9 targeting guide sequence portion
uucauuucagcucaauuuuu

SEQ ID NO: 8829 - RNA, 20 nt, Artificial Sequence
  SAMD9 targeting guide sequence portion
uugaccagaggauuucuuuu

SEQ ID NO: 8830 - RNA, 20 nt, Artificial Sequence
  SAMD9 targeting guide sequence portion
uuucagcucaauuuuuaaaa

SEQ ID NO: 8831 - RNA, 20 nt, Artificial Sequence
  SAMD9 targeting guide sequence portion
uuugaccagaggauuucuuu

SEQ ID NO: 8832 - RNA, 21 nt, Artificial Sequence
  SAMD9 targeting guide sequence portion
aaaauguaaaagaaauccucu

SEQ ID NO: 8833 - RNA, 21 nt, Artificial Sequence
  SAMD9 targeting guide sequence portion
aaauguaaaagaaauccucug

SEQ ID NO: 8834 - RNA, 21 nt, Artificial Sequence
  SAMD9 targeting guide sequence portion
aauguaaaagaaauccucugg

SEQ ID NO: 8835 - RNA, 21 nt, Artificial Sequence
  SAMD9 targeting guide sequence portion
acauuuuaaaaauugagcuga

SEQ ID NO: 8836 - RNA, 21 nt, Artificial Sequence
  SAMD9 targeting guide sequence portion
accagaggauuucuuuuacau

SEQ ID NO: 8837 - RNA, 21 nt, Artificial Sequence
  SAMD9 targeting guide sequence portion
agaggauuucuuuuacauuuu

SEQ ID NO: 8838 - RNA, 21 nt, Artificial Sequence
  SAMD9 targeting guide sequence portion
auguaaaagaaauccucuggu

SEQ ID NO: 8839 - RNA, 21 nt, Artificial Sequence
  SAMD9 targeting guide sequence portion
cagaggauuucuuuuacauuu

SEQ ID NO: 8840 - RNA, 21 nt, Artificial Sequence
  SAMD9 targeting guide sequence portion
cagcucaauuuuuaaaaugua

SEQ ID NO: 8841 - RNA, 21 nt, Artificial Sequence
  SAMD9 targeting guide sequence portion
cauuucagcucaauuuuuaaa

SEQ ID NO: 8842 - RNA, 21 nt, Artificial Sequence
  SAMD9 targeting guide sequence portion
cauuuuaaaaauugagcugaa

SEQ ID NO: 8843 - RNA, 21 nt, Artificial Sequence
  SAMD9 targeting guide sequence portion
ccagaggauuucuuuuacauu

SEQ ID NO: 8844 - RNA, 21 nt, Artificial Sequence
  SAMD9 targeting guide sequence portion
ccguuugaccagaggauuucu

SEQ ID NO: 8845 - RNA, 21 nt, Artificial Sequence
  SAMD9 targeting guide sequence portion
cguuugaccagaggauuucuu

SEQ ID NO: 8846 - RNA, 21 nt, Artificial Sequence
  SAMD9 targeting guide sequence portion
gaccagaggauuucuuuuaca

SEQ ID NO: 8847 - RNA, 21 nt, Artificial Sequence
  SAMD9 targeting guide sequence portion
gaggauuucuuuuacauuuua

SEQ ID NO: 8848 - RNA, 21 nt, Artificial Sequence
  SAMD9 targeting guide sequence portion
guaaaagaaauccucugguca

SEQ ID NO: 8849 - RNA, 21 nt, Artificial Sequence
  SAMD9 targeting guide sequence portion
guuugaccagaggauuucuuu

SEQ ID NO: 8850 - RNA, 21 nt, Artificial Sequence
  SAMD9 targeting guide sequence portion
uaaaauguaaaagaaauccuc

SEQ ID NO: 8851 - RNA, 21 nt, Artificial Sequence
  SAMD9 targeting guide sequence portion
uacauuuuaaaaauugagcug

SEQ ID NO: 8852 - RNA, 21 nt, Artificial Sequence
  SAMD9 targeting guide sequence portion
ucagcucaauuuuuaaaaugu

SEQ ID NO: 8853 - RNA, 21 nt, Artificial Sequence
  SAMD9 targeting guide sequence portion
ucauuucagcucaauuuuuaa

SEQ ID NO: 8854 - RNA, 21 nt, Artificial Sequence
  SAMD9 targeting guide sequence portion
uccguuugaccagaggauuuc

SEQ ID NO: 8855 - RNA, 21 nt, Artificial Sequence
  SAMD9 targeting guide sequence portion
ugaccagaggauuucuuuuac

SEQ ID NO: 8856 - RNA, 21 nt, Artificial Sequence
  SAMD9 targeting guide sequence portion
uguaaaagaaauccucugguc

SEQ ID NO: 8857 - RNA, 21 nt, Artificial Sequence
  SAMD9 targeting guide sequence portion
uucagcucaauuuuuaaaaug

SEQ ID NO: 8858 - RNA, 21 nt, Artificial Sequence
  SAMD9 targeting guide sequence portion
uucauuucagcucaauuuuua

SEQ ID NO: 8859 - RNA, 21 nt, Artificial Sequence
  SAMD9 targeting guide sequence portion
uugaccagaggauuucuuuua

SEQ ID NO: 8860 - RNA, 21 nt, Artificial Sequence
  SAMD9 targeting guide sequence portion
uuucauuucagcucaauuuuu

SEQ ID NO: 8861 - RNA, 21 nt, Artificial Sequence
  SAMD9 targeting guide sequence portion
uuugaccagaggauuucuuuu

SEQ ID NO: 8862 - RNA, 22 nt, Artificial Sequence
  SAMD9 targeting guide sequence portion
aaaauguaaaagaaauccucug

SEQ ID NO: 8863 - RNA, 22 nt, Artificial Sequence
  SAMD9 targeting guide sequence portion
aaauguaaaagaaauccucugg

SEQ ID NO: 8864 - RNA, 22 nt, Artificial Sequence
  SAMD9 targeting guide sequence portion
aauguaaaagaaauccucuggu

SEQ ID NO: 8865 - RNA, 22 nt, Artificial Sequence
  SAMD9 targeting guide sequence portion
acauuuuaaaaauugagcugaa

SEQ ID NO: 8866 - RNA, 22 nt, Artificial Sequence
  SAMD9 targeting guide sequence portion
accagaggauuucuuuuacauu

SEQ ID NO: 8867 - RNA, 22 nt, Artificial Sequence
  SAMD9 targeting guide sequence portion
agaggauuucuuuuacauuuua

SEQ ID NO: 8868 - RNA, 22 nt, Artificial Sequence
  SAMD9 targeting guide sequence portion
auguaaaagaaauccucugguc

SEQ ID NO: 8869 - RNA, 22 nt, Artificial Sequence
  SAMD9 targeting guide sequence portion
auuucauuucagcucaauuuuu

SEQ ID NO: 8870 - RNA, 22 nt, Artificial Sequence
  SAMD9 targeting guide sequence portion
cagaggauuucuuuuacauuuu

SEQ ID NO: 8871 - RNA, 22 nt, Artificial Sequence
  SAMD9 targeting guide sequence portion
cagcucaauuuuuaaaauguaa

SEQ ID NO: 8872 - RNA, 22 nt, Artificial Sequence
  SAMD9 targeting guide sequence portion
cauuucagcucaauuuuuaaaa

SEQ ID NO: 8873 - RNA, 22 nt, Artificial Sequence
  SAMD9 targeting guide sequence portion
cauuuuaaaaauugagcugaaa

SEQ ID NO: 8874 - RNA, 22 nt, Artificial Sequence
  SAMD9 targeting guide sequence portion
ccagaggauuucuuuuacauuu

SEQ ID NO: 8875 - RNA, 22 nt, Artificial Sequence
  SAMD9 targeting guide sequence portion
ccguuugaccagaggauuucuu

SEQ ID NO: 8876 - RNA, 22 nt, Artificial Sequence
  SAMD9 targeting guide sequence portion
cguuugaccagaggauuucuuu

SEQ ID NO: 8877 - RNA, 22 nt, Artificial Sequence
  SAMD9 targeting guide sequence portion
cuccguuugaccagaggauuuc

SEQ ID NO: 8878 - RNA, 22 nt, Artificial Sequence
  SAMD9 targeting guide sequence portion
gaccagaggauuucuuuuacau

SEQ ID NO: 8879 - RNA, 22 nt, Artificial Sequence
  SAMD9 targeting guide sequence portion
gaggauuucuuuuacauuuuaa

SEQ ID NO: 8880 - RNA, 22 nt, Artificial Sequence
  SAMD9 targeting guide sequence portion
guaaaagaaauccucuggucaa

SEQ ID NO: 8881 - RNA, 22 nt, Artificial Sequence
  SAMD9 targeting guide sequence portion
guuugaccagaggauuucuuuu

SEQ ID NO: 8882 - RNA, 22 nt, Artificial Sequence
  SAMD9 targeting guide sequence portion
uaaaauguaaaagaaauccucu

SEQ ID NO: 8883 - RNA, 22 nt, Artificial Sequence
  SAMD9 targeting guide sequence portion
uacauuuuaaaaauugagcuga

SEQ ID NO: 8884 - RNA, 22 nt, Artificial Sequence
  SAMD9 targeting guide sequence portion
ucagcucaauuuuuaaaaugua

SEQ ID NO: 8885 - RNA, 22 nt, Artificial Sequence
  SAMD9 targeting guide sequence portion
ucauuucagcucaauuuuuaaa

SEQ ID NO: 8886 - RNA, 22 nt, Artificial Sequence
  SAMD9 targeting guide sequence portion
uccguuugaccagaggauuucu

SEQ ID NO: 8887 - RNA, 22 nt, Artificial Sequence
  SAMD9 targeting guide sequence portion
ugaccagaggauuucuuuuaca

SEQ ID NO: 8888 - RNA, 22 nt, Artificial Sequence
  SAMD9 targeting guide sequence portion
uguaaaagaaauccucugguca

SEQ ID NO: 8889 - RNA, 22 nt, Artificial Sequence
  SAMD9 targeting guide sequence portion
uuaaaauguaaaagaaauccuc

SEQ ID NO: 8890 - RNA, 22 nt, Artificial Sequence
  SAMD9 targeting guide sequence portion
uuacauuuuaaaaauugagcug

SEQ ID NO: 8891 - RNA, 22 nt, Artificial Sequence
  SAMD9 targeting guide sequence portion
uucagcucaauuuuuaaaaugu

SEQ ID NO: 8892 - RNA, 22 nt, Artificial Sequence
  SAMD9 targeting guide sequence portion
uucauuucagcucaauuuuuaa

SEQ ID NO: 8893 - RNA, 22 nt, Artificial Sequence
  SAMD9 targeting guide sequence portion
uugaccagaggauuucuuuuac

SEQ ID NO: 8894 - RNA, 22 nt, Artificial Sequence
  SAMD9 targeting guide sequence portion
uuucagcucaauuuuuaaaaug

SEQ ID NO: 8895 - RNA, 22 nt, Artificial Sequence
  SAMD9 targeting guide sequence portion
uuucauuucagcucaauuuuua

SEQ ID NO: 8896 - RNA, 22 nt, Artificial Sequence
  SAMD9 targeting guide sequence portion
uuugaccagaggauuucuuuua

SEQ ID NO: 8897 - RNA, 20 nt, Artificial Sequence
  SAMD9 targeting guide sequence portion
aaaauauaaaagaaauccuc

SEQ ID NO: 8898 - RNA, 20 nt, Artificial Sequence
  SAMD9 targeting guide sequence portion
aaauauaaaagaaauccucu

SEQ ID NO: 8899 - RNA, 20 nt, Artificial Sequence
  SAMD9 targeting guide sequence portion
aauauaaaagaaauccucug

SEQ ID NO: 8900 - RNA, 20 nt, Artificial Sequence
  SAMD9 targeting guide sequence portion
accagaggauuucuuuuaua

SEQ ID NO: 8901 - RNA, 20 nt, Artificial Sequence
  SAMD9 targeting guide sequence portion
agaggauuucuuuuauauuu

SEQ ID NO: 8902 - RNA, 20 nt, Artificial Sequence
  SAMD9 targeting guide sequence portion
auaaaagaaauccucugguc

SEQ ID NO: 8903 - RNA, 20 nt, Artificial Sequence
  SAMD9 targeting guide sequence portion
auauaaaagaaauccucugg

SEQ ID NO: 8904 - RNA, 20 nt, Artificial Sequence
  SAMD9 targeting guide sequence portion
auauuuuaaaaauugagcug

SEQ ID NO: 8905 - RNA, 20 nt, Artificial Sequence
  SAMD9 targeting guide sequence portion
cagaggauuucuuuuauauu

SEQ ID NO: 8906 - RNA, 20 nt, Artificial Sequence
  SAMD9 targeting guide sequence portion
cagcucaauuuuuaaaauau

SEQ ID NO: 8907 - RNA, 20 nt, Artificial Sequence
  SAMD9 targeting guide sequence portion
ccagaggauuucuuuuauau

SEQ ID NO: 8908 - RNA, 20 nt, Artificial Sequence
  SAMD9 targeting guide sequence portion
gaccagaggauuucuuuuau

SEQ ID NO: 8909 - RNA, 20 nt, Artificial Sequence
  SAMD9 targeting guide sequence portion
gaggauuucuuuuauauuuu

SEQ ID NO: 8910 - RNA, 20 nt, Artificial Sequence
  SAMD9 targeting guide sequence portion
uauaaaagaaauccucuggu

SEQ ID NO: 8911 - RNA, 20 nt, Artificial Sequence
  SAMD9 targeting guide sequence portion
uauuuuaaaaauugagcuga

SEQ ID NO: 8912 - RNA, 20 nt, Artificial Sequence
  SAMD9 targeting guide sequence portion
ucagcucaauuuuuaaaaua

SEQ ID NO: 8913 - RNA, 21 nt, Artificial Sequence
  SAMD9 targeting guide sequence portion
aaauauaaaagaaauccucug

SEQ ID NO: 8914 - RNA, 21 nt, Artificial Sequence
  SAMD9 targeting guide sequence portion
aauauaaaagaaauccucugg

SEQ ID NO: 8915 - RNA, 21 nt, Artificial Sequence
  SAMD9 targeting guide sequence portion
accagaggauuucuuuuauau

SEQ ID NO: 8916 - RNA, 21 nt, Artificial Sequence
  SAMD9 targeting guide sequence portion
auaaaagaaauccucugguca

SEQ ID NO: 8917 - RNA, 21 nt, Artificial Sequence
  SAMD9 targeting guide sequence portion
auauaaaagaaauccucuggu

SEQ ID NO: 8918 - RNA, 21 nt, Artificial Sequence
  SAMD9 targeting guide sequence portion
cagaggauuucuuuuauauuu

SEQ ID NO: 8919 - RNA, 21 nt, Artificial Sequence
  SAMD9 targeting guide sequence portion
ccagaggauuucuuuuauauu

SEQ ID NO: 8920 - RNA, 21 nt, Artificial Sequence
  SAMD9 targeting guide sequence portion
gaccagaggauuucuuuuaua

SEQ ID NO: 8921 - RNA, 21 nt, Artificial Sequence
  SAMD9 targeting guide sequence portion
uauaaaagaaauccucugguc

SEQ ID NO: 8922 - RNA, 21 nt, Artificial Sequence
  SAMD9 targeting guide sequence portion
ugaccagaggauuucuuuuau

SEQ ID NO: 8923 - RNA, 22 nt, Artificial Sequence
  SAMD9 targeting guide sequence portion
aaaauauaaaagaaauccucug

SEQ ID NO: 8924 - RNA, 22 nt, Artificial Sequence
  SAMD9 targeting guide sequence portion
aaauauaaaagaaauccucugg

SEQ ID NO: 8925 - RNA, 22 nt, Artificial Sequence
  SAMD9 targeting guide sequence portion
aauauaaaagaaauccucuggu

SEQ ID NO: 8926 - RNA, 22 nt, Artificial Sequence
  SAMD9 targeting guide sequence portion
accagaggauuucuuuuauauu

SEQ ID NO: 8927 - RNA, 22 nt, Artificial Sequence
  SAMD9 targeting guide sequence portion
auaaaagaaauccucuggucaa

SEQ ID NO: 8928 - RNA, 22 nt, Artificial Sequence
  SAMD9 targeting guide sequence portion
auauaaaagaaauccucugguc

SEQ ID NO: 8929 - RNA, 22 nt, Artificial Sequence
  SAMD9 targeting guide sequence portion
cagaggauuucuuuuauauuuu

SEQ ID NO: 8930 - RNA, 22 nt, Artificial Sequence
  SAMD9 targeting guide sequence portion
ccagaggauuucuuuuauauuu

SEQ ID NO: 8931 - RNA, 22 nt, Artificial Sequence
  SAMD9 targeting guide sequence portion
gaccagaggauuucuuuuauau

SEQ ID NO: 8932 - RNA, 22 nt, Artificial Sequence
  SAMD9 targeting guide sequence portion
uauaaaagaaauccucugguca

SEQ ID NO: 8933 - RNA, 22 nt, Artificial Sequence
  SAMD9 targeting guide sequence portion
ugaccagaggauuucuuuuaua

SEQ ID NO: 8934 - RNA, 22 nt, Artificial Sequence
  SAMD9 targeting guide sequence portion
uugaccagaggauuucuuuuau

SEQ ID NO: 8935 - RNA, 20 nt, Artificial Sequence
  SAMD9 targeting guide sequence portion
aaaaaagcuaaacucauagg

SEQ ID NO: 8936 - RNA, 20 nt, Artificial Sequence
  SAMD9 targeting guide sequence portion
aaaaagcuaaacucauagga

SEQ ID NO: 8937 - RNA, 20 nt, Artificial Sequence
  SAMD9 targeting guide sequence portion
aaaagcuaaacucauaggag

SEQ ID NO: 8938 - RNA, 20 nt, Artificial Sequence
  SAMD9 targeting guide sequence portion
aaaccaccauucaacuuucu

SEQ ID NO: 8939 - RNA, 20 nt, Artificial Sequence
  SAMD9 targeting guide sequence portion
aaacucauaggagcagaaag

SEQ ID NO: 8940 - RNA, 20 nt, Artificial Sequence
  SAMD9 targeting guide sequence portion
aaagcuaaacucauaggagc

SEQ ID NO: 8941 - RNA, 20 nt, Artificial Sequence
  SAMD9 targeting guide sequence portion
aaccaccauucaacuuucug

SEQ ID NO: 8942 - RNA, 20 nt, Artificial Sequence
  SAMD9 targeting guide sequence portion
aacucauaggagcagaaagu

SEQ ID NO: 8943 - RNA, 20 nt, Artificial Sequence
  SAMD9 targeting guide sequence portion
aacuuucugcuccuaugagu

SEQ ID NO: 8944 - RNA, 20 nt, Artificial Sequence
  SAMD9 targeting guide sequence portion
aagcuaaacucauaggagca

SEQ ID NO: 8945 - RNA, 20 nt, Artificial Sequence
  SAMD9 targeting guide sequence portion
aaucuaaaaaagcuaaacuc

SEQ ID NO: 8946 - RNA, 20 nt, Artificial Sequence
  SAMD9 targeting guide sequence portion
accaccauucaacuuucugc

SEQ ID NO: 8947 - RNA, 20 nt, Artificial Sequence
  SAMD9 targeting guide sequence portion
accauucaacuuucugcucc

SEQ ID NO: 8948 - RNA, 20 nt, Artificial Sequence
  SAMD9 targeting guide sequence portion
acucauaggagcagaaaguu

SEQ ID NO: 8949 - RNA, 20 nt, Artificial Sequence
  SAMD9 targeting guide sequence portion
acuuucugcuccuaugaguu

SEQ ID NO: 8950 - RNA, 20 nt, Artificial Sequence
  SAMD9 targeting guide sequence portion
agcuaaacucauaggagcag

SEQ ID NO: 8951 - RNA, 20 nt, Artificial Sequence
  SAMD9 targeting guide sequence portion
aggagcagaaaguugaaugg

SEQ ID NO: 8952 - RNA, 20 nt, Artificial Sequence
  SAMD9 targeting guide sequence portion
auaggagcagaaaguugaau

SEQ ID NO: 8953 - RNA, 20 nt, Artificial Sequence
  SAMD9 targeting guide sequence portion
aucuaaaaaagcuaaacuca

SEQ ID NO: 8954 - RNA, 20 nt, Artificial Sequence
  SAMD9 targeting guide sequence portion
auucaacuuucugcuccuau

SEQ ID NO: 8955 - RNA, 20 nt, Artificial Sequence
  SAMD9 targeting guide sequence portion
caacuuucugcuccuaugag

SEQ ID NO: 8956 - RNA, 20 nt, Artificial Sequence
  SAMD9 targeting guide sequence portion
caccauucaacuuucugcuc

SEQ ID NO: 8957 - RNA, 20 nt, Artificial Sequence
  SAMD9 targeting guide sequence portion
cauaggagcagaaaguugaa

SEQ ID NO: 8958 - RNA, 20 nt, Artificial Sequence
  SAMD9 targeting guide sequence portion
cauucaacuuucugcuccua

SEQ ID NO: 8959 - RNA, 20 nt, Artificial Sequence
  SAMD9 targeting guide sequence portion
ccaccauucaacuuucugcu

SEQ ID NO: 8960 - RNA, 20 nt, Artificial Sequence
  SAMD9 targeting guide sequence portion
ccauucaacuuucugcuccu

SEQ ID NO: 8961 - RNA, 20 nt, Artificial Sequence
  SAMD9 targeting guide sequence portion
ccuaugaguuuagcuuuuuu

SEQ ID NO: 8962 - RNA, 20 nt, Artificial Sequence
  SAMD9 targeting guide sequence portion
cuaaaaaagcuaaacucaua

SEQ ID NO: 8963 - RNA, 20 nt, Artificial Sequence
  SAMD9 targeting guide sequence portion
cuaaacucauaggagcagaa

SEQ ID NO: 8964 - RNA, 20 nt, Artificial Sequence
  SAMD9 targeting guide sequence portion
cucauaggagcagaaaguug

SEQ ID NO: 8965 - RNA, 20 nt, Artificial Sequence
  SAMD9 targeting guide sequence portion
cuccuaugaguuuagcuuuu

SEQ ID NO: 8966 - RNA, 20 nt, Artificial Sequence
  SAMD9 targeting guide sequence portion
cugcuccuaugaguuuagcu

SEQ ID NO: 8967 - RNA, 20 nt, Artificial Sequence
  SAMD9 targeting guide sequence portion
cuuucugcuccuaugaguuu

SEQ ID NO: 8968 - RNA, 20 nt, Artificial Sequence
  SAMD9 targeting guide sequence portion
gaaaccaccauucaacuuuc

SEQ ID NO: 8969 - RNA, 20 nt, Artificial Sequence
  SAMD9 targeting guide sequence portion
gaaucuaaaaaagcuaaacu

SEQ ID NO: 8970 - RNA, 20 nt, Artificial Sequence
  SAMD9 targeting guide sequence portion
gagcagaaaguugaauggug

SEQ ID NO: 8971 - RNA, 20 nt, Artificial Sequence
  SAMD9 targeting guide sequence portion
gcuaaacucauaggagcaga

SEQ ID NO: 8972 - RNA, 20 nt, Artificial Sequence
  SAMD9 targeting guide sequence portion
gcuccuaugaguuuagcuuu

SEQ ID NO: 8973 - RNA, 20 nt, Artificial Sequence
  SAMD9 targeting guide sequence portion
ggaaaccaccauucaacuuu

SEQ ID NO: 8974 - RNA, 20 nt, Artificial Sequence
  SAMD9 targeting guide sequence portion
ggagcagaaaguugaauggu

SEQ ID NO: 8975 - RNA, 20 nt, Artificial Sequence
  SAMD9 targeting guide sequence portion
uaaaaaagcuaaacucauag

SEQ ID NO: 8976 - RNA, 20 nt, Artificial Sequence
  SAMD9 targeting guide sequence portion
uaaacucauaggagcagaaa

SEQ ID NO: 8977 - RNA, 20 nt, Artificial Sequence
  SAMD9 targeting guide sequence portion
uaggagcagaaaguugaaug

SEQ ID NO: 8978 - RNA, 20 nt, Artificial Sequence
  SAMD9 targeting guide sequence portion
ucaacuuucugcuccuauga

SEQ ID NO: 8979 - RNA, 20 nt, Artificial Sequence
  SAMD9 targeting guide sequence portion
ucauaggagcagaaaguuga

SEQ ID NO: 8980 - RNA, 20 nt, Artificial Sequence
  SAMD9 targeting guide sequence portion
uccuaugaguuuagcuuuuu

SEQ ID NO: 8981 - RNA, 20 nt, Artificial Sequence
  SAMD9 targeting guide sequence portion
ucuaaaaaagcuaaacucau

SEQ ID NO: 8982 - RNA, 20 nt, Artificial Sequence
  SAMD9 targeting guide sequence portion
ucugcuccuaugaguuuagc

SEQ ID NO: 8983 - RNA, 20 nt, Artificial Sequence
  SAMD9 targeting guide sequence portion
ugcuccuaugaguuuagcuu

SEQ ID NO: 8984 - RNA, 20 nt, Artificial Sequence
  SAMD9 targeting guide sequence portion
uucaacuuucugcuccuaug

SEQ ID NO: 8985 - RNA, 20 nt, Artificial Sequence
  SAMD9 targeting guide sequence portion
uucugcuccuaugaguuuag

SEQ ID NO: 8986 - RNA, 20 nt, Artificial Sequence
  SAMD9 targeting guide sequence portion
uuucugcuccuaugaguuua

SEQ ID NO: 8987 - RNA, 21 nt, Artificial Sequence
  SAMD9 targeting guide sequence portion
aaaaaagcuaaacucauagga

SEQ ID NO: 8988 - RNA, 21 nt, Artificial Sequence
  SAMD9 targeting guide sequence portion
aaaaagcuaaacucauaggag

SEQ ID NO: 8989 - RNA, 21 nt, Artificial Sequence
  SAMD9 targeting guide sequence portion
aaaagcuaaacucauaggagc

SEQ ID NO: 8990 - RNA, 21 nt, Artificial Sequence
  SAMD9 targeting guide sequence portion
aaaccaccauucaacuuucug

SEQ ID NO: 8991 - RNA, 21 nt, Artificial Sequence
  SAMD9 targeting guide sequence portion
aaacucauaggagcagaaagu

SEQ ID NO: 8992 - RNA, 21 nt, Artificial Sequence
  SAMD9 targeting guide sequence portion
aaagcuaaacucauaggagca

SEQ ID NO: 8993 - RNA, 21 nt, Artificial Sequence
  SAMD9 targeting guide sequence portion
aaccaccauucaacuuucugc

SEQ ID NO: 8994 - RNA, 21 nt, Artificial Sequence
  SAMD9 targeting guide sequence portion
aacucauaggagcagaaaguu

SEQ ID NO: 8995 - RNA, 21 nt, Artificial Sequence
  SAMD9 targeting guide sequence portion
aacuuucugcuccuaugaguu

SEQ ID NO: 8996 - RNA, 21 nt, Artificial Sequence
  SAMD9 targeting guide sequence portion
aagcuaaacucauaggagcag

SEQ ID NO: 8997 - RNA, 21 nt, Artificial Sequence
  SAMD9 targeting guide sequence portion
aaucuaaaaaagcuaaacuca

SEQ ID NO: 8998 - RNA, 21 nt, Artificial Sequence
  SAMD9 targeting guide sequence portion
accaccauucaacuuucugcu

SEQ ID NO: 8999 - RNA, 21 nt, Artificial Sequence
  SAMD9 targeting guide sequence portion
accauucaacuuucugcuccu

SEQ ID NO: 9000 - RNA, 21 nt, Artificial Sequence
  SAMD9 targeting guide sequence portion
acucauaggagcagaaaguug

SEQ ID NO: 9001 - RNA, 21 nt, Artificial Sequence
  SAMD9 targeting guide sequence portion
acuuucugcuccuaugaguuu

SEQ ID NO: 9002 - RNA, 21 nt, Artificial Sequence
  SAMD9 targeting guide sequence portion
agcuaaacucauaggagcaga

SEQ ID NO: 9003 - RNA, 21 nt, Artificial Sequence
  SAMD9 targeting guide sequence portion
aggagcagaaaguugaauggu

SEQ ID NO: 9004 - RNA, 21 nt, Artificial Sequence
  SAMD9 targeting guide sequence portion
auaggagcagaaaguugaaug

SEQ ID NO: 9005 - RNA, 21 nt, Artificial Sequence
  SAMD9 targeting guide sequence portion
aucuaaaaaagcuaaacucau

SEQ ID NO: 9006 - RNA, 21 nt, Artificial Sequence
  SAMD9 targeting guide sequence portion
auucaacuuucugcuccuaug

SEQ ID NO: 9007 - RNA, 21 nt, Artificial Sequence
  SAMD9 targeting guide sequence portion
caacuuucugcuccuaugagu

SEQ ID NO: 9008 - RNA, 21 nt, Artificial Sequence
  SAMD9 targeting guide sequence portion
caccauucaacuuucugcucc

SEQ ID NO: 9009 - RNA, 21 nt, Artificial Sequence
  SAMD9 targeting guide sequence portion
cauaggagcagaaaguugaau

SEQ ID NO: 9010 - RNA, 21 nt, Artificial Sequence
  SAMD9 targeting guide sequence portion
cauucaacuuucugcuccuau

SEQ ID NO: 9011 - RNA, 21 nt, Artificial Sequence
  SAMD9 targeting guide sequence portion
ccaccauucaacuuucugcuc

SEQ ID NO: 9012 - RNA, 21 nt, Artificial Sequence
  SAMD9 targeting guide sequence portion
ccauucaacuuucugcuccua

SEQ ID NO: 9013 - RNA, 21 nt, Artificial Sequence
  SAMD9 targeting guide sequence portion
ccuaugaguuuagcuuuuuua

SEQ ID NO: 9014 - RNA, 21 nt, Artificial Sequence
  SAMD9 targeting guide sequence portion
cuaaaaaagcuaaacucauag

SEQ ID NO: 9015 - RNA, 21 nt, Artificial Sequence
  SAMD9 targeting guide sequence portion
cuaaacucauaggagcagaaa

SEQ ID NO: 9016 - RNA, 21 nt, Artificial Sequence
  SAMD9 targeting guide sequence portion
cucauaggagcagaaaguuga

SEQ ID NO: 9017 - RNA, 21 nt, Artificial Sequence
  SAMD9 targeting guide sequence portion
cuccuaugaguuuagcuuuuu

SEQ ID NO: 9018 - RNA, 21 nt, Artificial Sequence
  SAMD9 targeting guide sequence portion
cugcuccuaugaguuuagcuu

SEQ ID NO: 9019 - RNA, 21 nt, Artificial Sequence
  SAMD9 targeting guide sequence portion
cuuucugcuccuaugaguuua

SEQ ID NO: 9020 - RNA, 21 nt, Artificial Sequence
  SAMD9 targeting guide sequence portion
gaaaccaccauucaacuuucu

SEQ ID NO: 9021 - RNA, 21 nt, Artificial Sequence
  SAMD9 targeting guide sequence portion
gaaucuaaaaaagcuaaacuc

SEQ ID NO: 9022 - RNA, 21 nt, Artificial Sequence
  SAMD9 targeting guide sequence portion
gagcagaaaguugaauggugg

SEQ ID NO: 9023 - RNA, 21 nt, Artificial Sequence
  SAMD9 targeting guide sequence portion
gcuaaacucauaggagcagaa

SEQ ID NO: 9024 - RNA, 21 nt, Artificial Sequence
  SAMD9 targeting guide sequence portion
gcuccuaugaguuuagcuuuu

SEQ ID NO: 9025 - RNA, 21 nt, Artificial Sequence
  SAMD9 targeting guide sequence portion
ggaaaccaccauucaacuuuc

SEQ ID NO: 9026 - RNA, 21 nt, Artificial Sequence
  SAMD9 targeting guide sequence portion
ggaaucuaaaaaagcuaaacu

SEQ ID NO: 9027 - RNA, 21 nt, Artificial Sequence
  SAMD9 targeting guide sequence portion
ggagcagaaaguugaauggug

SEQ ID NO: 9028 - RNA, 21 nt, Artificial Sequence
  SAMD9 targeting guide sequence portion
uaaaaaagcuaaacucauagg

SEQ ID NO: 9029 - RNA, 21 nt, Artificial Sequence
  SAMD9 targeting guide sequence portion
uaaacucauaggagcagaaag

SEQ ID NO: 9030 - RNA, 21 nt, Artificial Sequence
  SAMD9 targeting guide sequence portion
uaggagcagaaaguugaaugg

SEQ ID NO: 9031 - RNA, 21 nt, Artificial Sequence
  SAMD9 targeting guide sequence portion
ucaacuuucugcuccuaugag

SEQ ID NO: 9032 - RNA, 21 nt, Artificial Sequence
  SAMD9 targeting guide sequence portion
ucauaggagcagaaaguugaa

SEQ ID NO: 9033 - RNA, 21 nt, Artificial Sequence
  SAMD9 targeting guide sequence portion
uccuaugaguuuagcuuuuuu

SEQ ID NO: 9034 - RNA, 21 nt, Artificial Sequence
  SAMD9 targeting guide sequence portion
ucuaaaaaagcuaaacucaua

SEQ ID NO: 9035 - RNA, 21 nt, Artificial Sequence
  SAMD9 targeting guide sequence portion
ucugcuccuaugaguuuagcu

SEQ ID NO: 9036 - RNA, 21 nt, Artificial Sequence
  SAMD9 targeting guide sequence portion
ugcuccuaugaguuuagcuuu

SEQ ID NO: 9037 - RNA, 21 nt, Artificial Sequence
  SAMD9 targeting guide sequence portion
uggaaaccaccauucaacuuu

SEQ ID NO: 9038 - RNA, 21 nt, Artificial Sequence
  SAMD9 targeting guide sequence portion
uucaacuuucugcuccuauga

SEQ ID NO: 9039 - RNA, 21 nt, Artificial Sequence
  SAMD9 targeting guide sequence portion
uucugcuccuaugaguuuagc

SEQ ID NO: 9040 - RNA, 21 nt, Artificial Sequence
  SAMD9 targeting guide sequence portion
uuucugcuccuaugaguuuag

SEQ ID NO: 9041 - RNA, 22 nt, Artificial Sequence
  SAMD9 targeting guide sequence portion
aaaaaagcuaaacucauaggag

SEQ ID NO: 9042 - RNA, 22 nt, Artificial Sequence
  SAMD9 targeting guide sequence portion
aaaaagcuaaacucauaggagc

SEQ ID NO: 9043 - RNA, 22 nt, Artificial Sequence
  SAMD9 targeting guide sequence portion
aaaagcuaaacucauaggagca

SEQ ID NO: 9044 - RNA, 22 nt, Artificial Sequence
  SAMD9 targeting guide sequence portion
aaaccaccauucaacuuucugc

SEQ ID NO: 9045 - RNA, 22 nt, Artificial Sequence
  SAMD9 targeting guide sequence portion
aaacucauaggagcagaaaguu

SEQ ID NO: 9046 - RNA, 22 nt, Artificial Sequence
  SAMD9 targeting guide sequence portion
aaagcuaaacucauaggagcag

SEQ ID NO: 9047 - RNA, 22 nt, Artificial Sequence
  SAMD9 targeting guide sequence portion
aaccaccauucaacuuucugcu

SEQ ID NO: 9048 - RNA, 22 nt, Artificial Sequence
  SAMD9 targeting guide sequence portion
aacucauaggagcagaaaguug

SEQ ID NO: 9049 - RNA, 22 nt, Artificial Sequence
  SAMD9 targeting guide sequence portion
aacuuucugcuccuaugaguuu

SEQ ID NO: 9050 - RNA, 22 nt, Artificial Sequence
  SAMD9 targeting guide sequence portion
aagcuaaacucauaggagcaga

SEQ ID NO: 9051 - RNA, 22 nt, Artificial Sequence
  SAMD9 targeting guide sequence portion
aaucuaaaaaagcuaaacucau

SEQ ID NO: 9052 - RNA, 22 nt, Artificial Sequence
  SAMD9 targeting guide sequence portion
accaccauucaacuuucugcuc

SEQ ID NO: 9053 - RNA, 22 nt, Artificial Sequence
  SAMD9 targeting guide sequence portion
accauucaacuuucugcuccua

SEQ ID NO: 9054 - RNA, 22 nt, Artificial Sequence
  SAMD9 targeting guide sequence portion
acucauaggagcagaaaguuga

SEQ ID NO: 9055 - RNA, 22 nt, Artificial Sequence
  SAMD9 targeting guide sequence portion
acuuucugcuccuaugaguuua

SEQ ID NO: 9056 - RNA, 22 nt, Artificial Sequence
  SAMD9 targeting guide sequence portion
agcuaaacucauaggagcagaa

SEQ ID NO: 9057 - RNA, 22 nt, Artificial Sequence
  SAMD9 targeting guide sequence portion
aggagcagaaaguugaauggug

SEQ ID NO: 9058 - RNA, 22 nt, Artificial Sequence
  SAMD9 targeting guide sequence portion
auaggagcagaaaguugaaugg

SEQ ID NO: 9059 - RNA, 22 nt, Artificial Sequence
  SAMD9 targeting guide sequence portion
aucuaaaaaagcuaaacucaua

SEQ ID NO: 9060 - RNA, 22 nt, Artificial Sequence
  SAMD9 targeting guide sequence portion
auucaacuuucugcuccuauga

SEQ ID NO: 9061 - RNA, 22 nt, Artificial Sequence
  SAMD9 targeting guide sequence portion
caacuuucugcuccuaugaguu

SEQ ID NO: 9062 - RNA, 22 nt, Artificial Sequence
  SAMD9 targeting guide sequence portion
caccauucaacuuucugcuccu

SEQ ID NO: 9063 - RNA, 22 nt, Artificial Sequence
  SAMD9 targeting guide sequence portion
cauaggagcagaaaguugaaug

SEQ ID NO: 9064 - RNA, 22 nt, Artificial Sequence
  SAMD9 targeting guide sequence portion
cauucaacuuucugcuccuaug

SEQ ID NO: 9065 - RNA, 22 nt, Artificial Sequence
  SAMD9 targeting guide sequence portion
ccaccauucaacuuucugcucc

SEQ ID NO: 9066 - RNA, 22 nt, Artificial Sequence
  SAMD9 targeting guide sequence portion
ccauucaacuuucugcuccuau

SEQ ID NO: 9067 - RNA, 22 nt, Artificial Sequence
  SAMD9 targeting guide sequence portion
ccuaugaguuuagcuuuuuuag

SEQ ID NO: 9068 - RNA, 22 nt, Artificial Sequence
  SAMD9 targeting guide sequence portion
cuaaaaaagcuaaacucauagg

SEQ ID NO: 9069 - RNA, 22 nt, Artificial Sequence
  SAMD9 targeting guide sequence portion
cuaaacucauaggagcagaaag

SEQ ID NO: 9070 - RNA, 22 nt, Artificial Sequence
  SAMD9 targeting guide sequence portion
cucauaggagcagaaaguugaa

SEQ ID NO: 9071 - RNA, 22 nt, Artificial Sequence
  SAMD9 targeting guide sequence portion
cuccuaugaguuuagcuuuuuu

SEQ ID NO: 9072 - RNA, 22 nt, Artificial Sequence
  SAMD9 targeting guide sequence portion
cugcuccuaugaguuuagcuuu

SEQ ID NO: 9073 - RNA, 22 nt, Artificial Sequence
  SAMD9 targeting guide sequence portion
cuggaaaccaccauucaacuuu

SEQ ID NO: 9074 - RNA, 22 nt, Artificial Sequence
  SAMD9 targeting guide sequence portion
cuuucugcuccuaugaguuuag

SEQ ID NO: 9075 - RNA, 22 nt, Artificial Sequence
  SAMD9 targeting guide sequence portion
gaaaccaccauucaacuuucug

SEQ ID NO: 9076 - RNA, 22 nt, Artificial Sequence
  SAMD9 targeting guide sequence portion
gaaucuaaaaaagcuaaacuca

SEQ ID NO: 9077 - RNA, 22 nt, Artificial Sequence
  SAMD9 targeting guide sequence portion
gagcagaaaguugaaugguggu

SEQ ID NO: 9078 - RNA, 22 nt, Artificial Sequence
  SAMD9 targeting guide sequence portion
gcuaaacucauaggagcagaaa

SEQ ID NO: 9079 - RNA, 22 nt, Artificial Sequence
  SAMD9 targeting guide sequence portion
gcuccuaugaguuuagcuuuuu

SEQ ID NO: 9080 - RNA, 22 nt, Artificial Sequence
  SAMD9 targeting guide sequence portion
ggaaaccaccauucaacuuucu

SEQ ID NO: 9081 - RNA, 22 nt, Artificial Sequence
  SAMD9 targeting guide sequence portion
ggaaucuaaaaaagcuaaacuc

SEQ ID NO: 9082 - RNA, 22 nt, Artificial Sequence
  SAMD9 targeting guide sequence portion
ggagcagaaaguugaauggugg

SEQ ID NO: 9083 - RNA, 22 nt, Artificial Sequence
  SAMD9 targeting guide sequence portion
uaaaaaagcuaaacucauagga

SEQ ID NO: 9084 - RNA, 22 nt, Artificial Sequence
  SAMD9 targeting guide sequence portion
uaaacucauaggagcagaaagu

SEQ ID NO: 9085 - RNA, 22 nt, Artificial Sequence
  SAMD9 targeting guide sequence portion
uaggagcagaaaguugaauggu

SEQ ID NO: 9086 - RNA, 22 nt, Artificial Sequence
  SAMD9 targeting guide sequence portion
ucaacuuucugcuccuaugagu

SEQ ID NO: 9087 - RNA, 22 nt, Artificial Sequence
  SAMD9 targeting guide sequence portion
ucauaggagcagaaaguugaau

SEQ ID NO: 9088 - RNA, 22 nt, Artificial Sequence
  SAMD9 targeting guide sequence portion
uccuaugaguuuagcuuuuuua

SEQ ID NO: 9089 - RNA, 22 nt, Artificial Sequence
  SAMD9 targeting guide sequence portion
ucuaaaaaagcuaaacucauag

SEQ ID NO: 9090 - RNA, 22 nt, Artificial Sequence
  SAMD9 targeting guide sequence portion
ucugcuccuaugaguuuagcuu

SEQ ID NO: 9091 - RNA, 22 nt, Artificial Sequence
  SAMD9 targeting guide sequence portion
ugcuccuaugaguuuagcuuuu

SEQ ID NO: 9092 - RNA, 22 nt, Artificial Sequence
  SAMD9 targeting guide sequence portion
uggaaaccaccauucaacuuuc

SEQ ID NO: 9093 - RNA, 22 nt, Artificial Sequence
  SAMD9 targeting guide sequence portion
uggaaucuaaaaaagcuaaacu

SEQ ID NO: 9094 - RNA, 22 nt, Artificial Sequence
  SAMD9 targeting guide sequence portion
uucaacuuucugcuccuaugag

SEQ ID NO: 9095 - RNA, 22 nt, Artificial Sequence
  SAMD9 targeting guide sequence portion
uucugcuccuaugaguuuagcu

SEQ ID NO: 9096 - RNA, 22 nt, Artificial Sequence
  SAMD9 targeting guide sequence portion
uuucugcuccuaugaguuuagc

SEQ ID NO: 9097 - RNA, 20 nt, Artificial Sequence
  SAMD9 targeting guide sequence portion
aaaaaagcuaaacucauaga

SEQ ID NO: 9098 - RNA, 20 nt, Artificial Sequence
  SAMD9 targeting guide sequence portion
aaaaagcuaaacucauagaa

SEQ ID NO: 9099 - RNA, 20 nt, Artificial Sequence
  SAMD9 targeting guide sequence portion
aaaagcuaaacucauagaag

SEQ ID NO: 9100 - RNA, 20 nt, Artificial Sequence
  SAMD9 targeting guide sequence portion
aaacucauagaagcagaaag

SEQ ID NO: 9101 - RNA, 20 nt, Artificial Sequence
  SAMD9 targeting guide sequence portion
aaagcuaaacucauagaagc

SEQ ID NO: 9102 - RNA, 20 nt, Artificial Sequence
  SAMD9 targeting guide sequence portion
aacuuucugcuucuaugagu

SEQ ID NO: 9103 - RNA, 20 nt, Artificial Sequence
  SAMD9 targeting guide sequence portion
aagcagaaaguugaauggug

SEQ ID NO: 9104 - RNA, 20 nt, Artificial Sequence
  SAMD9 targeting guide sequence portion
aagcuaaacucauagaagca

SEQ ID NO: 9105 - RNA, 20 nt, Artificial Sequence
  SAMD9 targeting guide sequence portion
accauucaacuuucugcuuc

SEQ ID NO: 9106 - RNA, 20 nt, Artificial Sequence
  SAMD9 targeting guide sequence portion
acucauagaagcagaaaguu

SEQ ID NO: 9107 - RNA, 20 nt, Artificial Sequence
  SAMD9 targeting guide sequence portion
acuuucugcuucuaugaguu

SEQ ID NO: 9108 - RNA, 20 nt, Artificial Sequence
  SAMD9 targeting guide sequence portion
agaagcagaaaguugaaugg

SEQ ID NO: 9109 - RNA, 20 nt, Artificial Sequence
  SAMD9 targeting guide sequence portion
agcuaaacucauagaagcag

SEQ ID NO: 9110 - RNA, 20 nt, Artificial Sequence
  SAMD9 targeting guide sequence portion
auagaagcagaaaguugaau

SEQ ID NO: 9111 - RNA, 20 nt, Artificial Sequence
  SAMD9 targeting guide sequence portion
auucaacuuucugcuucuau

SEQ ID NO: 9112 - RNA, 20 nt, Artificial Sequence
  SAMD9 targeting guide sequence portion
caacuuucugcuucuaugag

SEQ ID NO: 9113 - RNA, 20 nt, Artificial Sequence
  SAMD9 targeting guide sequence portion
caccauucaacuuucugcuu

SEQ ID NO: 9114 - RNA, 20 nt, Artificial Sequence
  SAMD9 targeting guide sequence portion
cauagaagcagaaaguugaa

SEQ ID NO: 9115 - RNA, 20 nt, Artificial Sequence
  SAMD9 targeting guide sequence portion
ccauucaacuuucugcuucu

SEQ ID NO: 9116 - RNA, 20 nt, Artificial Sequence
  SAMD9 targeting guide sequence portion
cuaaacucauagaagcagaa

SEQ ID NO: 9117 - RNA, 20 nt, Artificial Sequence
  SAMD9 targeting guide sequence portion
cucauagaagcagaaaguug

SEQ ID NO: 9118 - RNA, 20 nt, Artificial Sequence
  SAMD9 targeting guide sequence portion
cugcuucuaugaguuuagcu

SEQ ID NO: 9119 - RNA, 20 nt, Artificial Sequence
  SAMD9 targeting guide sequence portion
cuucuaugaguuuagcuuuu

SEQ ID NO: 9120 - RNA, 20 nt, Artificial Sequence
  SAMD9 targeting guide sequence portion
cuuucugcuucuaugaguuu

SEQ ID NO: 9121 - RNA, 20 nt, Artificial Sequence
  SAMD9 targeting guide sequence portion
gaagcagaaaguugaauggu

SEQ ID NO: 9122 - RNA, 20 nt, Artificial Sequence
  SAMD9 targeting guide sequence portion
gcuaaacucauagaagcaga

SEQ ID NO: 9123 - RNA, 20 nt, Artificial Sequence
  SAMD9 targeting guide sequence portion
gcuucuaugaguuuagcuuu

SEQ ID NO: 9124 - RNA, 20 nt, Artificial Sequence
  SAMD9 targeting guide sequence portion
uaaacucauagaagcagaaa

SEQ ID NO: 9125 - RNA, 20 nt, Artificial Sequence
  SAMD9 targeting guide sequence portion
uagaagcagaaaguugaaug

SEQ ID NO: 9126 - RNA, 20 nt, Artificial Sequence
  SAMD9 targeting guide sequence portion
ucaacuuucugcuucuauga

SEQ ID NO: 9127 - RNA, 20 nt, Artificial Sequence
  SAMD9 targeting guide sequence portion
ucauagaagcagaaaguuga

SEQ ID NO: 9128 - RNA, 20 nt, Artificial Sequence
  SAMD9 targeting guide sequence portion
ucuaugaguuuagcuuuuuu

SEQ ID NO: 9129 - RNA, 20 nt, Artificial Sequence
  SAMD9 targeting guide sequence portion
ucugcuucuaugaguuuagc

SEQ ID NO: 9130 - RNA, 20 nt, Artificial Sequence
  SAMD9 targeting guide sequence portion
ugcuucuaugaguuuagcuu

SEQ ID NO: 9131 - RNA, 20 nt, Artificial Sequence
  SAMD9 targeting guide sequence portion
uucaacuuucugcuucuaug

SEQ ID NO: 9132 - RNA, 20 nt, Artificial Sequence
  SAMD9 targeting guide sequence portion
uucuaugaguuuagcuuuuu

SEQ ID NO: 9133 - RNA, 20 nt, Artificial Sequence
  SAMD9 targeting guide sequence portion
uucugcuucuaugaguuuag

SEQ ID NO: 9134 - RNA, 20 nt, Artificial Sequence
  SAMD9 targeting guide sequence portion
uuucugcuucuaugaguuua

SEQ ID NO: 9135 - RNA, 21 nt, Artificial Sequence
  SAMD9 targeting guide sequence portion
aaaaaagcuaaacucauagaa

SEQ ID NO: 9136 - RNA, 21 nt, Artificial Sequence
  SAMD9 targeting guide sequence portion
aaaaagcuaaacucauagaag

SEQ ID NO: 9137 - RNA, 21 nt, Artificial Sequence
  SAMD9 targeting guide sequence portion
aaaagcuaaacucauagaagc

SEQ ID NO: 9138 - RNA, 21 nt, Artificial Sequence
  SAMD9 targeting guide sequence portion
aaacucauagaagcagaaagu

SEQ ID NO: 9139 - RNA, 21 nt, Artificial Sequence
  SAMD9 targeting guide sequence portion
aaagcuaaacucauagaagca

SEQ ID NO: 9140 - RNA, 21 nt, Artificial Sequence
  SAMD9 targeting guide sequence portion
aacucauagaagcagaaaguu

SEQ ID NO: 9141 - RNA, 21 nt, Artificial Sequence
  SAMD9 targeting guide sequence portion
aacuuucugcuucuaugaguu

SEQ ID NO: 9142 - RNA, 21 nt, Artificial Sequence
  SAMD9 targeting guide sequence portion
aagcagaaaguugaauggugg

SEQ ID NO: 9143 - RNA, 21 nt, Artificial Sequence
  SAMD9 targeting guide sequence portion
aagcuaaacucauagaagcag

SEQ ID NO: 9144 - RNA, 21 nt, Artificial Sequence
  SAMD9 targeting guide sequence portion
accauucaacuuucugcuucu

SEQ ID NO: 9145 - RNA, 21 nt, Artificial Sequence
  SAMD9 targeting guide sequence portion
acucauagaagcagaaaguug

SEQ ID NO: 9146 - RNA, 21 nt, Artificial Sequence
  SAMD9 targeting guide sequence portion
acuuucugcuucuaugaguuu

SEQ ID NO: 9147 - RNA, 21 nt, Artificial Sequence
  SAMD9 targeting guide sequence portion
agaagcagaaaguugaauggu

SEQ ID NO: 9148 - RNA, 21 nt, Artificial Sequence
  SAMD9 targeting guide sequence portion
agcuaaacucauagaagcaga

SEQ ID NO: 9149 - RNA, 21 nt, Artificial Sequence
  SAMD9 targeting guide sequence portion
auagaagcagaaaguugaaug

SEQ ID NO: 9150 - RNA, 21 nt, Artificial Sequence
  SAMD9 targeting guide sequence portion
auucaacuuucugcuucuaug

SEQ ID NO: 9151 - RNA, 21 nt, Artificial Sequence
  SAMD9 targeting guide sequence portion
caacuuucugcuucuaugagu

SEQ ID NO: 9152 - RNA, 21 nt, Artificial Sequence
  SAMD9 targeting guide sequence portion
caccauucaacuuucugcuuc

SEQ ID NO: 9153 - RNA, 21 nt, Artificial Sequence
  SAMD9 targeting guide sequence portion
cauagaagcagaaaguugaau

SEQ ID NO: 9154 - RNA, 21 nt, Artificial Sequence
  SAMD9 targeting guide sequence portion
cauucaacuuucugcuucuau

SEQ ID NO: 9155 - RNA, 21 nt, Artificial Sequence
  SAMD9 targeting guide sequence portion
ccaccauucaacuuucugcuu

SEQ ID NO: 9156 - RNA, 21 nt, Artificial Sequence
  SAMD9 targeting guide sequence portion
ccauucaacuuucugcuucua

SEQ ID NO: 9157 - RNA, 21 nt, Artificial Sequence
  SAMD9 targeting guide sequence portion
cuaaacucauagaagcagaaa

SEQ ID NO: 9158 - RNA, 21 nt, Artificial Sequence
  SAMD9 targeting guide sequence portion
cucauagaagcagaaaguuga

SEQ ID NO: 9159 - RNA, 21 nt, Artificial Sequence
  SAMD9 targeting guide sequence portion
cugcuucuaugaguuuagcuu

SEQ ID NO: 9160 - RNA, 21 nt, Artificial Sequence
  SAMD9 targeting guide sequence portion
cuucuaugaguuuagcuuuuu

SEQ ID NO: 9161 - RNA, 21 nt, Artificial Sequence
  SAMD9 targeting guide sequence portion
cuuucugcuucuaugaguuua

SEQ ID NO: 9162 - RNA, 21 nt, Artificial Sequence
  SAMD9 targeting guide sequence portion
gaagcagaaaguugaauggug

SEQ ID NO: 9163 - RNA, 21 nt, Artificial Sequence
  SAMD9 targeting guide sequence portion
gcuaaacucauagaagcagaa

SEQ ID NO: 9164 - RNA, 21 nt, Artificial Sequence
  SAMD9 targeting guide sequence portion
gcuucuaugaguuuagcuuuu

SEQ ID NO: 9165 - RNA, 21 nt, Artificial Sequence
  SAMD9 targeting guide sequence portion
uaaaaaagcuaaacucauaga

SEQ ID NO: 9166 - RNA, 21 nt, Artificial Sequence
  SAMD9 targeting guide sequence portion
uaaacucauagaagcagaaag

SEQ ID NO: 9167 - RNA, 21 nt, Artificial Sequence
  SAMD9 targeting guide sequence portion
uagaagcagaaaguugaaugg

SEQ ID NO: 9168 - RNA, 21 nt, Artificial Sequence
  SAMD9 targeting guide sequence portion
ucaacuuucugcuucuaugag

SEQ ID NO: 9169 - RNA, 21 nt, Artificial Sequence
  SAMD9 targeting guide sequence portion
ucauagaagcagaaaguugaa

SEQ ID NO: 9170 - RNA, 21 nt, Artificial Sequence
  SAMD9 targeting guide sequence portion
ucuaugaguuuagcuuuuuua

SEQ ID NO: 9171 - RNA, 21 nt, Artificial Sequence
  SAMD9 targeting guide sequence portion
ucugcuucuaugaguuuagcu

SEQ ID NO: 9172 - RNA, 21 nt, Artificial Sequence
  SAMD9 targeting guide sequence portion
ugcuucuaugaguuuagcuuu

SEQ ID NO: 9173 - RNA, 21 nt, Artificial Sequence
  SAMD9 targeting guide sequence portion
uucaacuuucugcuucuauga

SEQ ID NO: 9174 - RNA, 21 nt, Artificial Sequence
  SAMD9 targeting guide sequence portion
uucuaugaguuuagcuuuuuu

SEQ ID NO: 9175 - RNA, 21 nt, Artificial Sequence
  SAMD9 targeting guide sequence portion
uucugcuucuaugaguuuagc

SEQ ID NO: 9176 - RNA, 21 nt, Artificial Sequence
  SAMD9 targeting guide sequence portion
uuucugcuucuaugaguuuag

SEQ ID NO: 9177 - RNA, 22 nt, Artificial Sequence
  SAMD9 targeting guide sequence portion
aaaaaagcuaaacucauagaag

SEQ ID NO: 9178 - RNA, 22 nt, Artificial Sequence
  SAMD9 targeting guide sequence portion
aaaaagcuaaacucauagaagc

SEQ ID NO: 9179 - RNA, 22 nt, Artificial Sequence
  SAMD9 targeting guide sequence portion
aaaagcuaaacucauagaagca

SEQ ID NO: 9180 - RNA, 22 nt, Artificial Sequence
  SAMD9 targeting guide sequence portion
aaacucauagaagcagaaaguu

SEQ ID NO: 9181 - RNA, 22 nt, Artificial Sequence
  SAMD9 targeting guide sequence portion
aaagcuaaacucauagaagcag

SEQ ID NO: 9182 - RNA, 22 nt, Artificial Sequence
  SAMD9 targeting guide sequence portion
aacucauagaagcagaaaguug

SEQ ID NO: 9183 - RNA, 22 nt, Artificial Sequence
  SAMD9 targeting guide sequence portion
aacuuucugcuucuaugaguuu

SEQ ID NO: 9184 - RNA, 22 nt, Artificial Sequence
  SAMD9 targeting guide sequence portion
aagcagaaaguugaaugguggu

SEQ ID NO: 9185 - RNA, 22 nt, Artificial Sequence
  SAMD9 targeting guide sequence portion
aagcuaaacucauagaagcaga

SEQ ID NO: 9186 - RNA, 22 nt, Artificial Sequence
  SAMD9 targeting guide sequence portion
accaccauucaacuuucugcuu

SEQ ID NO: 9187 - RNA, 22 nt, Artificial Sequence
  SAMD9 targeting guide sequence portion
accauucaacuuucugcuucua

SEQ ID NO: 9188 - RNA, 22 nt, Artificial Sequence
  SAMD9 targeting guide sequence portion
acucauagaagcagaaaguuga

SEQ ID NO: 9189 - RNA, 22 nt, Artificial Sequence
  SAMD9 targeting guide sequence portion
acuuucugcuucuaugaguuua

SEQ ID NO: 9190 - RNA, 22 nt, Artificial Sequence
  SAMD9 targeting guide sequence portion
agaagcagaaaguugaauggug

SEQ ID NO: 9191 - RNA, 22 nt, Artificial Sequence
  SAMD9 targeting guide sequence portion
agcuaaacucauagaagcagaa

SEQ ID NO: 9192 - RNA, 22 nt, Artificial Sequence
  SAMD9 targeting guide sequence portion
auagaagcagaaaguugaaugg

SEQ ID NO: 9193 - RNA, 22 nt, Artificial Sequence
  SAMD9 targeting guide sequence portion
auucaacuuucugcuucuauga

SEQ ID NO: 9194 - RNA, 22 nt, Artificial Sequence
  SAMD9 targeting guide sequence portion
caacuuucugcuucuaugaguu

SEQ ID NO: 9195 - RNA, 22 nt, Artificial Sequence
  SAMD9 targeting guide sequence portion
caccauucaacuuucugcuucu

SEQ ID NO: 9196 - RNA, 22 nt, Artificial Sequence
  SAMD9 targeting guide sequence portion
cauagaagcagaaaguugaaug

SEQ ID NO: 9197 - RNA, 22 nt, Artificial Sequence
  SAMD9 targeting guide sequence portion
cauucaacuuucugcuucuaug

SEQ ID NO: 9198 - RNA, 22 nt, Artificial Sequence
  SAMD9 targeting guide sequence portion
ccaccauucaacuuucugcuuc

SEQ ID NO: 9199 - RNA, 22 nt, Artificial Sequence
  SAMD9 targeting guide sequence portion
ccauucaacuuucugcuucuau

SEQ ID NO: 9200 - RNA, 22 nt, Artificial Sequence
  SAMD9 targeting guide sequence portion
cuaaaaaagcuaaacucauaga

SEQ ID NO: 9201 - RNA, 22 nt, Artificial Sequence
  SAMD9 targeting guide sequence portion
cuaaacucauagaagcagaaag

SEQ ID NO: 9202 - RNA, 22 nt, Artificial Sequence
  SAMD9 targeting guide sequence portion
cucauagaagcagaaaguugaa

SEQ ID NO: 9203 - RNA, 22 nt, Artificial Sequence
  SAMD9 targeting guide sequence portion
cugcuucuaugaguuuagcuuu

SEQ ID NO: 9204 - RNA, 22 nt, Artificial Sequence
  SAMD9 targeting guide sequence portion
cuucuaugaguuuagcuuuuuu

SEQ ID NO: 9205 - RNA, 22 nt, Artificial Sequence
  SAMD9 targeting guide sequence portion
cuuucugcuucuaugaguuuag

SEQ ID NO: 9206 - RNA, 22 nt, Artificial Sequence
  SAMD9 targeting guide sequence portion
gaagcagaaaguugaauggugg

SEQ ID NO: 9207 - RNA, 22 nt, Artificial Sequence
  SAMD9 targeting guide sequence portion
gcuaaacucauagaagcagaaa

SEQ ID NO: 9208 - RNA, 22 nt, Artificial Sequence
  SAMD9 targeting guide sequence portion
gcuucuaugaguuuagcuuuuu

SEQ ID NO: 9209 - RNA, 22 nt, Artificial Sequence
  SAMD9 targeting guide sequence portion
uaaaaaagcuaaacucauagaa

SEQ ID NO: 9210 - RNA, 22 nt, Artificial Sequence
  SAMD9 targeting guide sequence portion
uaaacucauagaagcagaaagu

SEQ ID NO: 9211 - RNA, 22 nt, Artificial Sequence
  SAMD9 targeting guide sequence portion
uagaagcagaaaguugaauggu

SEQ ID NO: 9212 - RNA, 22 nt, Artificial Sequence
  SAMD9 targeting guide sequence portion
ucaacuuucugcuucuaugagu

SEQ ID NO: 9213 - RNA, 22 nt, Artificial Sequence
  SAMD9 targeting guide sequence portion
ucauagaagcagaaaguugaau

SEQ ID NO: 9214 - RNA, 22 nt, Artificial Sequence
  SAMD9 targeting guide sequence portion
ucuaugaguuuagcuuuuuuag

SEQ ID NO: 9215 - RNA, 22 nt, Artificial Sequence
  SAMD9 targeting guide sequence portion
ucugcuucuaugaguuuagcuu

SEQ ID NO: 9216 - RNA, 22 nt, Artificial Sequence
  SAMD9 targeting guide sequence portion
ugcuucuaugaguuuagcuuuu

SEQ ID NO: 9217 - RNA, 22 nt, Artificial Sequence
  SAMD9 targeting guide sequence portion
uucaacuuucugcuucuaugag

SEQ ID NO: 9218 - RNA, 22 nt, Artificial Sequence
  SAMD9 targeting guide sequence portion
uucuaugaguuuagcuuuuuua

SEQ ID NO: 9219 - RNA, 22 nt, Artificial Sequence
  SAMD9 targeting guide sequence portion
uucugcuucuaugaguuuagcu

SEQ ID NO: 9220 - RNA, 22 nt, Artificial Sequence
  SAMD9 targeting guide sequence portion
uuucugcuucuaugaguuuagc

SEQ ID NO: 9221 - RNA, 20 nt, Artificial Sequence
  SAMD9 targeting guide sequence portion
acaguauauaucuauaucaa

SEQ ID NO: 9222 - RNA, 20 nt, Artificial Sequence
  SAMD9 targeting guide sequence portion
agauauauacugugaaauga

SEQ ID NO: 9223 - RNA, 20 nt, Artificial Sequence
  SAMD9 targeting guide sequence portion
agccugauguuuugauauag

SEQ ID NO: 9224 - RNA, 20 nt, Artificial Sequence
  SAMD9 targeting guide sequence portion
agucauuucacaguauauau

SEQ ID NO: 9225 - RNA, 20 nt, Artificial Sequence
  SAMD9 targeting guide sequence portion
auagauauauacugugaaau

SEQ ID NO: 9226 - RNA, 20 nt, Artificial Sequence
  SAMD9 targeting guide sequence portion
auauagauauauacugugaa

SEQ ID NO: 9227 - RNA, 20 nt, Artificial Sequence
  SAMD9 targeting guide sequence portion
auauauacugugaaaugacu

SEQ ID NO: 9228 - RNA, 20 nt, Artificial Sequence
  SAMD9 targeting guide sequence portion
auaucuauaucaaaacauca

SEQ ID NO: 9229 - RNA, 20 nt, Artificial Sequence
  SAMD9 targeting guide sequence portion
aucuauaucaaaacaucagg

SEQ ID NO: 9230 - RNA, 20 nt, Artificial Sequence
  SAMD9 targeting guide sequence portion
auuuagucauuucacaguau

SEQ ID NO: 9231 - RNA, 20 nt, Artificial Sequence
  SAMD9 targeting guide sequence portion
auuucacaguauauaucuau

SEQ ID NO: 9232 - RNA, 20 nt, Artificial Sequence
  SAMD9 targeting guide sequence portion
cacaguauauaucuauauca

SEQ ID NO: 9233 - RNA, 20 nt, Artificial Sequence
  SAMD9 targeting guide sequence portion
cagccugauguuuugauaua

SEQ ID NO: 9234 - RNA, 20 nt, Artificial Sequence
  SAMD9 targeting guide sequence portion
caguauauaucuauaucaaa

SEQ ID NO: 9235 - RNA, 20 nt, Artificial Sequence
  SAMD9 targeting guide sequence portion
cauuuagucauuucacagua

SEQ ID NO: 9236 - RNA, 20 nt, Artificial Sequence
  SAMD9 targeting guide sequence portion
cauuucacaguauauaucua

SEQ ID NO: 9237 - RNA, 20 nt, Artificial Sequence
  SAMD9 targeting guide sequence portion
ccugauguuuugauauagau

SEQ ID NO: 9238 - RNA, 20 nt, Artificial Sequence
  SAMD9 targeting guide sequence portion
cguucagccugauguuuuga

SEQ ID NO: 9239 - RNA, 20 nt, Artificial Sequence
  SAMD9 targeting guide sequence portion
cugauguuuugauauagaua

SEQ ID NO: 9240 - RNA, 20 nt, Artificial Sequence
  SAMD9 targeting guide sequence portion
gauauagauauauacuguga

SEQ ID NO: 9241 - RNA, 20 nt, Artificial Sequence
  SAMD9 targeting guide sequence portion
gauauauacugugaaaugac

SEQ ID NO: 9242 - RNA, 20 nt, Artificial Sequence
  SAMD9 targeting guide sequence portion
gauguuuugauauagauaua

SEQ ID NO: 9243 - RNA, 20 nt, Artificial Sequence
  SAMD9 targeting guide sequence portion
gccugauguuuugauauaga

SEQ ID NO: 9244 - RNA, 20 nt, Artificial Sequence
  SAMD9 targeting guide sequence portion
guauauaucuauaucaaaac

SEQ ID NO: 9245 - RNA, 20 nt, Artificial Sequence
  SAMD9 targeting guide sequence portion
gucauuucacaguauauauc

SEQ ID NO: 9246 - RNA, 20 nt, Artificial Sequence
  SAMD9 targeting guide sequence portion
guucagccugauguuuugau

SEQ ID NO: 9247 - RNA, 20 nt, Artificial Sequence
  SAMD9 targeting guide sequence portion
guuuugauauagauauauac

SEQ ID NO: 9248 - RNA, 20 nt, Artificial Sequence
  SAMD9 targeting guide sequence portion
uagauauauacugugaaaug

SEQ ID NO: 9249 - RNA, 20 nt, Artificial Sequence
  SAMD9 targeting guide sequence portion
uagucauuucacaguauaua

SEQ ID NO: 9250 - RNA, 20 nt, Artificial Sequence
  SAMD9 targeting guide sequence portion
uauagauauauacugugaaa

SEQ ID NO: 9251 - RNA, 20 nt, Artificial Sequence
  SAMD9 targeting guide sequence portion
uauaucuauaucaaaacauc

SEQ ID NO: 9252 - RNA, 20 nt, Artificial Sequence
  SAMD9 targeting guide sequence portion
uaucuauaucaaaacaucag

SEQ ID NO: 9253 - RNA, 20 nt, Artificial Sequence
  SAMD9 targeting guide sequence portion
ucacaguauauaucuauauc

SEQ ID NO: 9254 - RNA, 20 nt, Artificial Sequence
  SAMD9 targeting guide sequence portion
ucagccugauguuuugauau

SEQ ID NO: 9255 - RNA, 20 nt, Artificial Sequence
  SAMD9 targeting guide sequence portion
ucauuuagucauuucacagu

SEQ ID NO: 9256 - RNA, 20 nt, Artificial Sequence
  SAMD9 targeting guide sequence portion
ucauuucacaguauauaucu

SEQ ID NO: 9257 - RNA, 20 nt, Artificial Sequence
  SAMD9 targeting guide sequence portion
ucuauaucaaaacaucaggc

SEQ ID NO: 9258 - RNA, 20 nt, Artificial Sequence
  SAMD9 targeting guide sequence portion
ugauauagauauauacugug

SEQ ID NO: 9259 - RNA, 20 nt, Artificial Sequence
  SAMD9 targeting guide sequence portion
ugauguuuugauauagauau

SEQ ID NO: 9260 - RNA, 20 nt, Artificial Sequence
  SAMD9 targeting guide sequence portion
uuagucauuucacaguauau

SEQ ID NO: 9261 - RNA, 20 nt, Artificial Sequence
  SAMD9 targeting guide sequence portion
uucacaguauauaucuauau

SEQ ID NO: 9262 - RNA, 20 nt, Artificial Sequence
  SAMD9 targeting guide sequence portion
uucagccugauguuuugaua

SEQ ID NO: 9263 - RNA, 20 nt, Artificial Sequence
  SAMD9 targeting guide sequence portion
uugauauagauauauacugu

SEQ ID NO: 9264 - RNA, 20 nt, Artificial Sequence
  SAMD9 targeting guide sequence portion
uuuagucauuucacaguaua

SEQ ID NO: 9265 - RNA, 20 nt, Artificial Sequence
  SAMD9 targeting guide sequence portion
uuucacaguauauaucuaua

SEQ ID NO: 9266 - RNA, 20 nt, Artificial Sequence
  SAMD9 targeting guide sequence portion
uuugauauagauauauacug

SEQ ID NO: 9267 - RNA, 21 nt, Artificial Sequence
  SAMD9 targeting guide sequence portion
agauauauacugugaaaugac

SEQ ID NO: 9268 - RNA, 21 nt, Artificial Sequence
  SAMD9 targeting guide sequence portion
agccugauguuuugauauaga

SEQ ID NO: 9269 - RNA, 21 nt, Artificial Sequence
  SAMD9 targeting guide sequence portion
agucauuucacaguauauauc

SEQ ID NO: 9270 - RNA, 21 nt, Artificial Sequence
  SAMD9 targeting guide sequence portion
auagauauauacugugaaaug

SEQ ID NO: 9271 - RNA, 21 nt, Artificial Sequence
  SAMD9 targeting guide sequence portion
auauauacugugaaaugacua

SEQ ID NO: 9272 - RNA, 21 nt, Artificial Sequence
  SAMD9 targeting guide sequence portion
auaucuauaucaaaacaucag

SEQ ID NO: 9273 - RNA, 21 nt, Artificial Sequence
  SAMD9 targeting guide sequence portion
aucuauaucaaaacaucaggc

SEQ ID NO: 9274 - RNA, 21 nt, Artificial Sequence
  SAMD9 targeting guide sequence portion
auuuagucauuucacaguaua

SEQ ID NO: 9275 - RNA, 21 nt, Artificial Sequence
  SAMD9 targeting guide sequence portion
cacaguauauaucuauaucaa

SEQ ID NO: 9276 - RNA, 21 nt, Artificial Sequence
  SAMD9 targeting guide sequence portion
cagccugauguuuugauauag

SEQ ID NO: 9277 - RNA, 21 nt, Artificial Sequence
  SAMD9 targeting guide sequence portion
cauuuagucauuucacaguau

SEQ ID NO: 9278 - RNA, 21 nt, Artificial Sequence
  SAMD9 targeting guide sequence portion
cauuucacaguauauaucuau

SEQ ID NO: 9279 - RNA, 21 nt, Artificial Sequence
  SAMD9 targeting guide sequence portion
ccugauguuuugauauagaua

SEQ ID NO: 9280 - RNA, 21 nt, Artificial Sequence
  SAMD9 targeting guide sequence portion
cguucagccugauguuuugau

SEQ ID NO: 9281 - RNA, 21 nt, Artificial Sequence
  SAMD9 targeting guide sequence portion
cugauguuuugauauagauau

SEQ ID NO: 9282 - RNA, 21 nt, Artificial Sequence
  SAMD9 targeting guide sequence portion
gauauagauauauacugugaa

SEQ ID NO: 9283 - RNA, 21 nt, Artificial Sequence
  SAMD9 targeting guide sequence portion
gauauauacugugaaaugacu

SEQ ID NO: 9284 - RNA, 21 nt, Artificial Sequence
  SAMD9 targeting guide sequence portion
gccugauguuuugauauagau

SEQ ID NO: 9285 - RNA, 21 nt, Artificial Sequence
  SAMD9 targeting guide sequence portion
gcguucagccugauguuuuga

SEQ ID NO: 9286 - RNA, 21 nt, Artificial Sequence
  SAMD9 targeting guide sequence portion
gucauuucacaguauauaucu

SEQ ID NO: 9287 - RNA, 21 nt, Artificial Sequence
  SAMD9 targeting guide sequence portion
guucagccugauguuuugaua

SEQ ID NO: 9288 - RNA, 21 nt, Artificial Sequence
  SAMD9 targeting guide sequence portion
uagauauauacugugaaauga

SEQ ID NO: 9289 - RNA, 21 nt, Artificial Sequence
  SAMD9 targeting guide sequence portion
uagucauuucacaguauauau

SEQ ID NO: 9290 - RNA, 21 nt, Artificial Sequence
  SAMD9 targeting guide sequence portion
uaucuauaucaaaacaucagg

SEQ ID NO: 9291 - RNA, 21 nt, Artificial Sequence
  SAMD9 targeting guide sequence portion
ucacaguauauaucuauauca

SEQ ID NO: 9292 - RNA, 21 nt, Artificial Sequence
  SAMD9 targeting guide sequence portion
ucagccugauguuuugauaua

SEQ ID NO: 9293 - RNA, 21 nt, Artificial Sequence
  SAMD9 targeting guide sequence portion
ucauuuagucauuucacagua

SEQ ID NO: 9294 - RNA, 21 nt, Artificial Sequence
  SAMD9 targeting guide sequence portion
ucauuucacaguauauaucua

SEQ ID NO: 9295 - RNA, 21 nt, Artificial Sequence
  SAMD9 targeting guide sequence portion
ucuauaucaaaacaucaggcu

SEQ ID NO: 9296 - RNA, 21 nt, Artificial Sequence
  SAMD9 targeting guide sequence portion
ugauauagauauauacuguga

SEQ ID NO: 9297 - RNA, 21 nt, Artificial Sequence
  SAMD9 targeting guide sequence portion
uuagucauuucacaguauaua

SEQ ID NO: 9298 - RNA, 21 nt, Artificial Sequence
  SAMD9 targeting guide sequence portion
uucacaguauauaucuauauc

SEQ ID NO: 9299 - RNA, 21 nt, Artificial Sequence
  SAMD9 targeting guide sequence portion
uucagccugauguuuugauau

SEQ ID NO: 9300 - RNA, 21 nt, Artificial Sequence
  SAMD9 targeting guide sequence portion
uucauuuagucauuucacagu

SEQ ID NO: 9301 - RNA, 21 nt, Artificial Sequence
  SAMD9 targeting guide sequence portion
uugauauagauauauacugug

SEQ ID NO: 9302 - RNA, 21 nt, Artificial Sequence
  SAMD9 targeting guide sequence portion
uuuagucauuucacaguauau

SEQ ID NO: 9303 - RNA, 22 nt, Artificial Sequence
  SAMD9 targeting guide sequence portion
agauauauacugugaaaugacu

SEQ ID NO: 9304 - RNA, 22 nt, Artificial Sequence
  SAMD9 targeting guide sequence portion
agccugauguuuugauauagau

SEQ ID NO: 9305 - RNA, 22 nt, Artificial Sequence
  SAMD9 targeting guide sequence portion
agucauuucacaguauauaucu

SEQ ID NO: 9306 - RNA, 22 nt, Artificial Sequence
  SAMD9 targeting guide sequence portion
auagauauauacugugaaauga

SEQ ID NO: 9307 - RNA, 22 nt, Artificial Sequence
  SAMD9 targeting guide sequence portion
auauauacugugaaaugacuaa

SEQ ID NO: 9308 - RNA, 22 nt, Artificial Sequence
  SAMD9 targeting guide sequence portion
auaucuauaucaaaacaucagg

SEQ ID NO: 9309 - RNA, 22 nt, Artificial Sequence
  SAMD9 targeting guide sequence portion
aucuauaucaaaacaucaggcu

SEQ ID NO: 9310 - RNA, 22 nt, Artificial Sequence
  SAMD9 targeting guide sequence portion
auuuagucauuucacaguauau

SEQ ID NO: 9311 - RNA, 22 nt, Artificial Sequence
  SAMD9 targeting guide sequence portion
cacaguauauaucuauaucaaa

SEQ ID NO: 9312 - RNA, 22 nt, Artificial Sequence
  SAMD9 targeting guide sequence portion
cagccugauguuuugauauaga

SEQ ID NO: 9313 - RNA, 22 nt, Artificial Sequence
  SAMD9 targeting guide sequence portion
caguauauaucuauaucaaaac

SEQ ID NO: 9314 - RNA, 22 nt, Artificial Sequence
  SAMD9 targeting guide sequence portion
cauuuagucauuucacaguaua

SEQ ID NO: 9315 - RNA, 22 nt, Artificial Sequence
  SAMD9 targeting guide sequence portion
cauuucacaguauauaucuaua

SEQ ID NO: 9316 - RNA, 22 nt, Artificial Sequence
  SAMD9 targeting guide sequence portion
ccugauguuuugauauagauau

SEQ ID NO: 9317 - RNA, 22 nt, Artificial Sequence
  SAMD9 targeting guide sequence portion
cguucagccugauguuuugaua

SEQ ID NO: 9318 - RNA, 22 nt, Artificial Sequence
  SAMD9 targeting guide sequence portion
cugauguuuugauauagauaua

SEQ ID NO: 9319 - RNA, 22 nt, Artificial Sequence
  SAMD9 targeting guide sequence portion
cuucauuuagucauuucacagu

SEQ ID NO: 9320 - RNA, 22 nt, Artificial Sequence
  SAMD9 targeting guide sequence portion
gauauagauauauacugugaaa

SEQ ID NO: 9321 - RNA, 22 nt, Artificial Sequence
  SAMD9 targeting guide sequence portion
gauauauacugugaaaugacua

SEQ ID NO: 9322 - RNA, 22 nt, Artificial Sequence
  SAMD9 targeting guide sequence portion
gccugauguuuugauauagaua

SEQ ID NO: 9323 - RNA, 22 nt, Artificial Sequence
  SAMD9 targeting guide sequence portion
gcguucagccugauguuuugau

SEQ ID NO: 9324 - RNA, 22 nt, Artificial Sequence
  SAMD9 targeting guide sequence portion
ggcguucagccugauguuuuga

SEQ ID NO: 9325 - RNA, 22 nt, Artificial Sequence
  SAMD9 targeting guide sequence portion
gucauuucacaguauauaucua

SEQ ID NO: 9326 - RNA, 22 nt, Artificial Sequence
  SAMD9 targeting guide sequence portion
guucagccugauguuuugauau

SEQ ID NO: 9327 - RNA, 22 nt, Artificial Sequence
  SAMD9 targeting guide sequence portion
guuuugauauagauauauacug

SEQ ID NO: 9328 - RNA, 22 nt, Artificial Sequence
  SAMD9 targeting guide sequence portion
uagauauauacugugaaaugac

SEQ ID NO: 9329 - RNA, 22 nt, Artificial Sequence
  SAMD9 targeting guide sequence portion
uagucauuucacaguauauauc

SEQ ID NO: 9330 - RNA, 22 nt, Artificial Sequence
  SAMD9 targeting guide sequence portion
uauagauauauacugugaaaug

SEQ ID NO: 9331 - RNA, 22 nt, Artificial Sequence
  SAMD9 targeting guide sequence portion
uauaucuauaucaaaacaucag

SEQ ID NO: 9332 - RNA, 22 nt, Artificial Sequence
  SAMD9 targeting guide sequence portion
uaucuauaucaaaacaucaggc

SEQ ID NO: 9333 - RNA, 22 nt, Artificial Sequence
  SAMD9 targeting guide sequence portion
ucacaguauauaucuauaucaa

SEQ ID NO: 9334 - RNA, 22 nt, Artificial Sequence
  SAMD9 targeting guide sequence portion
ucagccugauguuuugauauag

SEQ ID NO: 9335 - RNA, 22 nt, Artificial Sequence
  SAMD9 targeting guide sequence portion
ucauuuagucauuucacaguau

SEQ ID NO: 9336 - RNA, 22 nt, Artificial Sequence
  SAMD9 targeting guide sequence portion
ucauuucacaguauauaucuau

SEQ ID NO: 9337 - RNA, 22 nt, Artificial Sequence
  SAMD9 targeting guide sequence portion
ucuauaucaaaacaucaggcug

SEQ ID NO: 9338 - RNA, 22 nt, Artificial Sequence
  SAMD9 targeting guide sequence portion
ugauauagauauauacugugaa

SEQ ID NO: 9339 - RNA, 22 nt, Artificial Sequence
  SAMD9 targeting guide sequence portion
uuagucauuucacaguauauau

SEQ ID NO: 9340 - RNA, 22 nt, Artificial Sequence
  SAMD9 targeting guide sequence portion
uucacaguauauaucuauauca

SEQ ID NO: 9341 - RNA, 22 nt, Artificial Sequence
  SAMD9 targeting guide sequence portion
uucagccugauguuuugauaua

SEQ ID NO: 9342 - RNA, 22 nt, Artificial Sequence
  SAMD9 targeting guide sequence portion
uucauuuagucauuucacagua

SEQ ID NO: 9343 - RNA, 22 nt, Artificial Sequence
  SAMD9 targeting guide sequence portion
uugauauagauauauacuguga

SEQ ID NO: 9344 - RNA, 22 nt, Artificial Sequence
  SAMD9 targeting guide sequence portion
uuuagucauuucacaguauaua

SEQ ID NO: 9345 - RNA, 22 nt, Artificial Sequence
  SAMD9 targeting guide sequence portion
uuucacaguauauaucuauauc

SEQ ID NO: 9346 - RNA, 22 nt, Artificial Sequence
  SAMD9 targeting guide sequence portion
uuugauauagauauauacugug

SEQ ID NO: 9347 - RNA, 20 nt, Artificial Sequence
  SAMD9 targeting guide sequence portion
acaguauauaccuauaucaa

SEQ ID NO: 9348 - RNA, 20 nt, Artificial Sequence
  SAMD9 targeting guide sequence portion
accuauaucaaaacaucagg

SEQ ID NO: 9349 - RNA, 20 nt, Artificial Sequence
  SAMD9 targeting guide sequence portion
agguauauacugugaaauga

SEQ ID NO: 9350 - RNA, 20 nt, Artificial Sequence
  SAMD9 targeting guide sequence portion
aguauauaccuauaucaaaa

SEQ ID NO: 9351 - RNA, 20 nt, Artificial Sequence
  SAMD9 targeting guide sequence portion
agucauuucacaguauauac

SEQ ID NO: 9352 - RNA, 20 nt, Artificial Sequence
  SAMD9 targeting guide sequence portion
auaccuauaucaaaacauca

SEQ ID NO: 9353 - RNA, 20 nt, Artificial Sequence
  SAMD9 targeting guide sequence portion
auagguauauacugugaaau

SEQ ID NO: 9354 - RNA, 20 nt, Artificial Sequence
  SAMD9 targeting guide sequence portion
auauaccuauaucaaaacau

SEQ ID NO: 9355 - RNA, 20 nt, Artificial Sequence
  SAMD9 targeting guide sequence portion
auauagguauauacugugaa

SEQ ID NO: 9356 - RNA, 20 nt, Artificial Sequence
  SAMD9 targeting guide sequence portion
auguuuugauauagguauau

SEQ ID NO: 9357 - RNA, 20 nt, Artificial Sequence
  SAMD9 targeting guide sequence portion
auuucacaguauauaccuau

SEQ ID NO: 9358 - RNA, 20 nt, Artificial Sequence
  SAMD9 targeting guide sequence portion
cacaguauauaccuauauca

SEQ ID NO: 9359 - RNA, 20 nt, Artificial Sequence
  SAMD9 targeting guide sequence portion
caguauauaccuauaucaaa

SEQ ID NO: 9360 - RNA, 20 nt, Artificial Sequence
  SAMD9 targeting guide sequence portion
cauuucacaguauauaccua

SEQ ID NO: 9361 - RNA, 20 nt, Artificial Sequence
  SAMD9 targeting guide sequence portion
ccuauaucaaaacaucaggc

SEQ ID NO: 9362 - RNA, 20 nt, Artificial Sequence
  SAMD9 targeting guide sequence portion
ccugauguuuugauauaggu

SEQ ID NO: 9363 - RNA, 20 nt, Artificial Sequence
  SAMD9 targeting guide sequence portion
cugauguuuugauauaggua

SEQ ID NO: 9364 - RNA, 20 nt, Artificial Sequence
  SAMD9 targeting guide sequence portion
gauauagguauauacuguga

SEQ ID NO: 9365 - RNA, 20 nt, Artificial Sequence
  SAMD9 targeting guide sequence portion
gauguuuugauauagguaua

SEQ ID NO: 9366 - RNA, 20 nt, Artificial Sequence
  SAMD9 targeting guide sequence portion
gccugauguuuugauauagg

SEQ ID NO: 9367 - RNA, 20 nt, Artificial Sequence
  SAMD9 targeting guide sequence portion
gguauauacugugaaaugac

SEQ ID NO: 9368 - RNA, 20 nt, Artificial Sequence
  SAMD9 targeting guide sequence portion
guauauaccuauaucaaaac

SEQ ID NO: 9369 - RNA, 20 nt, Artificial Sequence
  SAMD9 targeting guide sequence portion
guauauacugugaaaugacu

SEQ ID NO: 9370 - RNA, 20 nt, Artificial Sequence
  SAMD9 targeting guide sequence portion
gucauuucacaguauauacc

SEQ ID NO: 9371 - RNA, 20 nt, Artificial Sequence
  SAMD9 targeting guide sequence portion
guuuugauauagguauauac

SEQ ID NO: 9372 - RNA, 20 nt, Artificial Sequence
  SAMD9 targeting guide sequence portion
uaccuauaucaaaacaucag

SEQ ID NO: 9373 - RNA, 20 nt, Artificial Sequence
  SAMD9 targeting guide sequence portion
uagguauauacugugaaaug

SEQ ID NO: 9374 - RNA, 20 nt, Artificial Sequence
  SAMD9 targeting guide sequence portion
uauaccuauaucaaaacauc

SEQ ID NO: 9375 - RNA, 20 nt, Artificial Sequence
  SAMD9 targeting guide sequence portion
uauagguauauacugugaaa

SEQ ID NO: 9376 - RNA, 20 nt, Artificial Sequence
  SAMD9 targeting guide sequence portion
uauauaccuauaucaaaaca

SEQ ID NO: 9377 - RNA, 20 nt, Artificial Sequence
  SAMD9 targeting guide sequence portion
ucacaguauauaccuauauc

SEQ ID NO: 9378 - RNA, 20 nt, Artificial Sequence
  SAMD9 targeting guide sequence portion
ucauuucacaguauauaccu

SEQ ID NO: 9379 - RNA, 20 nt, Artificial Sequence
  SAMD9 targeting guide sequence portion
ugauauagguauauacugug

SEQ ID NO: 9380 - RNA, 20 nt, Artificial Sequence
  SAMD9 targeting guide sequence portion
ugauguuuugauauagguau

SEQ ID NO: 9381 - RNA, 20 nt, Artificial Sequence
  SAMD9 targeting guide sequence portion
uguuuugauauagguauaua

SEQ ID NO: 9382 - RNA, 20 nt, Artificial Sequence
  SAMD9 targeting guide sequence portion
uucacaguauauaccuauau

SEQ ID NO: 9383 - RNA, 20 nt, Artificial Sequence
  SAMD9 targeting guide sequence portion
uugauauagguauauacugu

SEQ ID NO: 9384 - RNA, 20 nt, Artificial Sequence
  SAMD9 targeting guide sequence portion
uuucacaguauauaccuaua

SEQ ID NO: 9385 - RNA, 20 nt, Artificial Sequence
  SAMD9 targeting guide sequence portion
uuugauauagguauauacug

SEQ ID NO: 9386 - RNA, 20 nt, Artificial Sequence
  SAMD9 targeting guide sequence portion
uuuugauauagguauauacu

SEQ ID NO: 9387 - RNA, 21 nt, Artificial Sequence
  SAMD9 targeting guide sequence portion
acaguauauaccuauaucaaa

SEQ ID NO: 9388 - RNA, 21 nt, Artificial Sequence
  SAMD9 targeting guide sequence portion
accuauaucaaaacaucaggc

SEQ ID NO: 9389 - RNA, 21 nt, Artificial Sequence
  SAMD9 targeting guide sequence portion
agccugauguuuugauauagg

SEQ ID NO: 9390 - RNA, 21 nt, Artificial Sequence
  SAMD9 targeting guide sequence portion
agguauauacugugaaaugac

SEQ ID NO: 9391 - RNA, 21 nt, Artificial Sequence
  SAMD9 targeting guide sequence portion
aguauauaccuauaucaaaac

SEQ ID NO: 9392 - RNA, 21 nt, Artificial Sequence
  SAMD9 targeting guide sequence portion
agucauuucacaguauauacc

SEQ ID NO: 9393 - RNA, 21 nt, Artificial Sequence
  SAMD9 targeting guide sequence portion
auaccuauaucaaaacaucag

SEQ ID NO: 9394 - RNA, 21 nt, Artificial Sequence
  SAMD9 targeting guide sequence portion
auagguauauacugugaaaug

SEQ ID NO: 9395 - RNA, 21 nt, Artificial Sequence
  SAMD9 targeting guide sequence portion
auauaccuauaucaaaacauc

SEQ ID NO: 9396 - RNA, 21 nt, Artificial Sequence
  SAMD9 targeting guide sequence portion
auauagguauauacugugaaa

SEQ ID NO: 9397 - RNA, 21 nt, Artificial Sequence
  SAMD9 targeting guide sequence portion
auuucacaguauauaccuaua

SEQ ID NO: 9398 - RNA, 21 nt, Artificial Sequence
  SAMD9 targeting guide sequence portion
cacaguauauaccuauaucaa

SEQ ID NO: 9399 - RNA, 21 nt, Artificial Sequence
  SAMD9 targeting guide sequence portion
caguauauaccuauaucaaaa

SEQ ID NO: 9400 - RNA, 21 nt, Artificial Sequence
  SAMD9 targeting guide sequence portion
cauuucacaguauauaccuau

SEQ ID NO: 9401 - RNA, 21 nt, Artificial Sequence
  SAMD9 targeting guide sequence portion
ccuauaucaaaacaucaggcu

SEQ ID NO: 9402 - RNA, 21 nt, Artificial Sequence
  SAMD9 targeting guide sequence portion
ccugauguuuugauauaggua

SEQ ID NO: 9403 - RNA, 21 nt, Artificial Sequence
  SAMD9 targeting guide sequence portion
cugauguuuugauauagguau

SEQ ID NO: 9404 - RNA, 21 nt, Artificial Sequence
  SAMD9 targeting guide sequence portion
gauauagguauauacugugaa

SEQ ID NO: 9405 - RNA, 21 nt, Artificial Sequence
  SAMD9 targeting guide sequence portion
gauguuuugauauagguauau

SEQ ID NO: 9406 - RNA, 21 nt, Artificial Sequence
  SAMD9 targeting guide sequence portion
gccugauguuuugauauaggu

SEQ ID NO: 9407 - RNA, 21 nt, Artificial Sequence
  SAMD9 targeting guide sequence portion
gguauauacugugaaaugacu

SEQ ID NO: 9408 - RNA, 21 nt, Artificial Sequence
  SAMD9 targeting guide sequence portion
guauauaccuauaucaaaaca

SEQ ID NO: 9409 - RNA, 21 nt, Artificial Sequence
  SAMD9 targeting guide sequence portion
guauauacugugaaaugacua

SEQ ID NO: 9410 - RNA, 21 nt, Artificial Sequence
  SAMD9 targeting guide sequence portion
gucauuucacaguauauaccu

SEQ ID NO: 9411 - RNA, 21 nt, Artificial Sequence
  SAMD9 targeting guide sequence portion
guuuugauauagguauauacu

SEQ ID NO: 9412 - RNA, 21 nt, Artificial Sequence
  SAMD9 targeting guide sequence portion
uaccuauaucaaaacaucagg

SEQ ID NO: 9413 - RNA, 21 nt, Artificial Sequence
  SAMD9 targeting guide sequence portion
uagguauauacugugaaauga

SEQ ID NO: 9414 - RNA, 21 nt, Artificial Sequence
  SAMD9 targeting guide sequence portion
uagucauuucacaguauauac

SEQ ID NO: 9415 - RNA, 21 nt, Artificial Sequence
  SAMD9 targeting guide sequence portion
uauaccuauaucaaaacauca

SEQ ID NO: 9416 - RNA, 21 nt, Artificial Sequence
  SAMD9 targeting guide sequence portion
uauagguauauacugugaaau

SEQ ID NO: 9417 - RNA, 21 nt, Artificial Sequence
  SAMD9 targeting guide sequence portion
ucacaguauauaccuauauca

SEQ ID NO: 9418 - RNA, 21 nt, Artificial Sequence
  SAMD9 targeting guide sequence portion
ucauuucacaguauauaccua

SEQ ID NO: 9419 - RNA, 21 nt, Artificial Sequence
  SAMD9 targeting guide sequence portion
ugauauagguauauacuguga

SEQ ID NO: 9420 - RNA, 21 nt, Artificial Sequence
  SAMD9 targeting guide sequence portion
ugauguuuugauauagguaua

SEQ ID NO: 9421 - RNA, 21 nt, Artificial Sequence
  SAMD9 targeting guide sequence portion
uguuuugauauagguauauac

SEQ ID NO: 9422 - RNA, 21 nt, Artificial Sequence
  SAMD9 targeting guide sequence portion
uucacaguauauaccuauauc

SEQ ID NO: 9423 - RNA, 21 nt, Artificial Sequence
  SAMD9 targeting guide sequence portion
uugauauagguauauacugug

SEQ ID NO: 9424 - RNA, 21 nt, Artificial Sequence
  SAMD9 targeting guide sequence portion
uuucacaguauauaccuauau

SEQ ID NO: 9425 - RNA, 21 nt, Artificial Sequence
  SAMD9 targeting guide sequence portion
uuugauauagguauauacugu

SEQ ID NO: 9426 - RNA, 21 nt, Artificial Sequence
  SAMD9 targeting guide sequence portion
uuuugauauagguauauacug

SEQ ID NO: 9427 - RNA, 22 nt, Artificial Sequence
  SAMD9 targeting guide sequence portion
acaguauauaccuauaucaaaa

SEQ ID NO: 9428 - RNA, 22 nt, Artificial Sequence
  SAMD9 targeting guide sequence portion
accuauaucaaaacaucaggcu

SEQ ID NO: 9429 - RNA, 22 nt, Artificial Sequence
  SAMD9 targeting guide sequence portion
agccugauguuuugauauaggu

SEQ ID NO: 9430 - RNA, 22 nt, Artificial Sequence
  SAMD9 targeting guide sequence portion
agguauauacugugaaaugacu

SEQ ID NO: 9431 - RNA, 22 nt, Artificial Sequence
  SAMD9 targeting guide sequence portion
aguauauaccuauaucaaaaca

SEQ ID NO: 9432 - RNA, 22 nt, Artificial Sequence
  SAMD9 targeting guide sequence portion
agucauuucacaguauauaccu

SEQ ID NO: 9433 - RNA, 22 nt, Artificial Sequence
  SAMD9 targeting guide sequence portion
auaccuauaucaaaacaucagg

SEQ ID NO: 9434 - RNA, 22 nt, Artificial Sequence
  SAMD9 targeting guide sequence portion
auagguauauacugugaaauga

SEQ ID NO: 9435 - RNA, 22 nt, Artificial Sequence
  SAMD9 targeting guide sequence portion
auauaccuauaucaaaacauca

SEQ ID NO: 9436 - RNA, 22 nt, Artificial Sequence
  SAMD9 targeting guide sequence portion
auauagguauauacugugaaau

SEQ ID NO: 9437 - RNA, 22 nt, Artificial Sequence
  SAMD9 targeting guide sequence portion
auguuuugauauagguauauac

SEQ ID NO: 9438 - RNA, 22 nt, Artificial Sequence
  SAMD9 targeting guide sequence portion
auuucacaguauauaccuauau

SEQ ID NO: 9439 - RNA, 22 nt, Artificial Sequence
  SAMD9 targeting guide sequence portion
cacaguauauaccuauaucaaa

SEQ ID NO: 9440 - RNA, 22 nt, Artificial Sequence
  SAMD9 targeting guide sequence portion
cagccugauguuuugauauagg

SEQ ID NO: 9441 - RNA, 22 nt, Artificial Sequence
  SAMD9 targeting guide sequence portion
caguauauaccuauaucaaaac

SEQ ID NO: 9442 - RNA, 22 nt, Artificial Sequence
  SAMD9 targeting guide sequence portion
cauuucacaguauauaccuaua

SEQ ID NO: 9443 - RNA, 22 nt, Artificial Sequence
  SAMD9 targeting guide sequence portion
ccuauaucaaaacaucaggcug

SEQ ID NO: 9444 - RNA, 22 nt, Artificial Sequence
  SAMD9 targeting guide sequence portion
ccugauguuuugauauagguau

SEQ ID NO: 9445 - RNA, 22 nt, Artificial Sequence
  SAMD9 targeting guide sequence portion
cugauguuuugauauagguaua

SEQ ID NO: 9446 - RNA, 22 nt, Artificial Sequence
  SAMD9 targeting guide sequence portion
gauauagguauauacugugaaa

SEQ ID NO: 9447 - RNA, 22 nt, Artificial Sequence
  SAMD9 targeting guide sequence portion
gauguuuugauauagguauaua

SEQ ID NO: 9448 - RNA, 22 nt, Artificial Sequence
  SAMD9 targeting guide sequence portion
gccugauguuuugauauaggua

SEQ ID NO: 9449 - RNA, 22 nt, Artificial Sequence
  SAMD9 targeting guide sequence portion
gguauauacugugaaaugacua

SEQ ID NO: 9450 - RNA, 22 nt, Artificial Sequence
  SAMD9 targeting guide sequence portion
guauauaccuauaucaaaacau

SEQ ID NO: 9451 - RNA, 22 nt, Artificial Sequence
  SAMD9 targeting guide sequence portion
guauauacugugaaaugacuaa

SEQ ID NO: 9452 - RNA, 22 nt, Artificial Sequence
  SAMD9 targeting guide sequence portion
gucauuucacaguauauaccua

SEQ ID NO: 9453 - RNA, 22 nt, Artificial Sequence
  SAMD9 targeting guide sequence portion
guuuugauauagguauauacug

SEQ ID NO: 9454 - RNA, 22 nt, Artificial Sequence
  SAMD9 targeting guide sequence portion
uaccuauaucaaaacaucaggc

SEQ ID NO: 9455 - RNA, 22 nt, Artificial Sequence
  SAMD9 targeting guide sequence portion
uagguauauacugugaaaugac

SEQ ID NO: 9456 - RNA, 22 nt, Artificial Sequence
  SAMD9 targeting guide sequence portion
uagucauuucacaguauauacc

SEQ ID NO: 9457 - RNA, 22 nt, Artificial Sequence
  SAMD9 targeting guide sequence portion
uauaccuauaucaaaacaucag

SEQ ID NO: 9458 - RNA, 22 nt, Artificial Sequence
  SAMD9 targeting guide sequence portion
uauagguauauacugugaaaug

SEQ ID NO: 9459 - RNA, 22 nt, Artificial Sequence
  SAMD9 targeting guide sequence portion
uauauaccuauaucaaaacauc

SEQ ID NO: 9460 - RNA, 22 nt, Artificial Sequence
  SAMD9 targeting guide sequence portion
ucacaguauauaccuauaucaa

SEQ ID NO: 9461 - RNA, 22 nt, Artificial Sequence
  SAMD9 targeting guide sequence portion
ucauuucacaguauauaccuau

SEQ ID NO: 9462 - RNA, 22 nt, Artificial Sequence
  SAMD9 targeting guide sequence portion
ugauauagguauauacugugaa

SEQ ID NO: 9463 - RNA, 22 nt, Artificial Sequence
  SAMD9 targeting guide sequence portion
ugauguuuugauauagguauau

SEQ ID NO: 9464 - RNA, 22 nt, Artificial Sequence
  SAMD9 targeting guide sequence portion
uguuuugauauagguauauacu

SEQ ID NO: 9465 - RNA, 22 nt, Artificial Sequence
  SAMD9 targeting guide sequence portion
uuagucauuucacaguauauac

SEQ ID NO: 9466 - RNA, 22 nt, Artificial Sequence
  SAMD9 targeting guide sequence portion
uucacaguauauaccuauauca

SEQ ID NO: 9467 - RNA, 22 nt, Artificial Sequence
  SAMD9 targeting guide sequence portion
uugauauagguauauacuguga

SEQ ID NO: 9468 - RNA, 22 nt, Artificial Sequence
  SAMD9 targeting guide sequence portion
uuucacaguauauaccuauauc

SEQ ID NO: 9469 - RNA, 22 nt, Artificial Sequence
  SAMD9 targeting guide sequence portion
uuugauauagguauauacugug

SEQ ID NO: 9470 - RNA, 22 nt, Artificial Sequence
  SAMD9 targeting guide sequence portion
uuuugauauagguauauacugu

SEQ ID NO: 9471 - RNA, 20 nt, Artificial Sequence
  SAMD9 targeting guide sequence portion
aaaaaauguuggggaaucua

SEQ ID NO: 9472 - RNA, 20 nt, Artificial Sequence
  SAMD9 targeting guide sequence portion
aaaaauguuggggaaucuau

SEQ ID NO: 9473 - RNA, 20 nt, Artificial Sequence
  SAMD9 targeting guide sequence portion
aaaauguuggggaaucuaua

SEQ ID NO: 9474 - RNA, 20 nt, Artificial Sequence
  SAMD9 targeting guide sequence portion
aaagaaauugcaaaggacca

SEQ ID NO: 9475 - RNA, 20 nt, Artificial Sequence
  SAMD9 targeting guide sequence portion
aaauguuggggaaucuauac

SEQ ID NO: 9476 - RNA, 20 nt, Artificial Sequence
  SAMD9 targeting guide sequence portion
aaauugcaaaggaccaaaaa

SEQ ID NO: 9477 - RNA, 20 nt, Artificial Sequence
  SAMD9 targeting guide sequence portion
aagaaauugcaaaggaccaa

SEQ ID NO: 9478 - RNA, 20 nt, Artificial Sequence
  SAMD9 targeting guide sequence portion
aauguauagauuccccaaca

SEQ ID NO: 9479 - RNA, 20 nt, Artificial Sequence
  SAMD9 targeting guide sequence portion
aauguuggggaaucuauaca

SEQ ID NO: 9480 - RNA, 20 nt, Artificial Sequence
  SAMD9 targeting guide sequence portion
aauugcaaaggaccaaaaaa

SEQ ID NO: 9481 - RNA, 20 nt, Artificial Sequence
  SAMD9 targeting guide sequence portion
agaaauugcaaaggaccaaa

SEQ ID NO: 9482 - RNA, 20 nt, Artificial Sequence
  SAMD9 targeting guide sequence portion
auaauguauagauuccccaa

SEQ ID NO: 9483 - RNA, 20 nt, Artificial Sequence
  SAMD9 targeting guide sequence portion
auagauuccccaacauuuuu

SEQ ID NO: 9484 - RNA, 20 nt, Artificial Sequence
  SAMD9 targeting guide sequence portion
auguauagauuccccaacau

SEQ ID NO: 9485 - RNA, 20 nt, Artificial Sequence
  SAMD9 targeting guide sequence portion
auguuggggaaucuauacau

SEQ ID NO: 9486 - RNA, 20 nt, Artificial Sequence
  SAMD9 targeting guide sequence portion
cuuauaauguauagauuccc

SEQ ID NO: 9487 - RNA, 20 nt, Artificial Sequence
  SAMD9 targeting guide sequence portion
gaaauugcaaaggaccaaaa

SEQ ID NO: 9488 - RNA, 20 nt, Artificial Sequence
  SAMD9 targeting guide sequence portion
guauagauuccccaacauuu

SEQ ID NO: 9489 - RNA, 20 nt, Artificial Sequence
  SAMD9 targeting guide sequence portion
uaauguauagauuccccaac

SEQ ID NO: 9490 - RNA, 20 nt, Artificial Sequence
  SAMD9 targeting guide sequence portion
uagauuccccaacauuuuuu

SEQ ID NO: 9491 - RNA, 20 nt, Artificial Sequence
  SAMD9 targeting guide sequence portion
uauaauguauagauucccca

SEQ ID NO: 9492 - RNA, 20 nt, Artificial Sequence
  SAMD9 targeting guide sequence portion
uauagauuccccaacauuuu

SEQ ID NO: 9493 - RNA, 20 nt, Artificial Sequence
  SAMD9 targeting guide sequence portion
uguauagauuccccaacauu

SEQ ID NO: 9494 - RNA, 20 nt, Artificial Sequence
  SAMD9 targeting guide sequence portion
uuauaauguauagauucccc

SEQ ID NO: 9495 - RNA, 21 nt, Artificial Sequence
  SAMD9 targeting guide sequence portion
aaaaaauguuggggaaucuau

SEQ ID NO: 9496 - RNA, 21 nt, Artificial Sequence
  SAMD9 targeting guide sequence portion
aaaaauguuggggaaucuaua

SEQ ID NO: 9497 - RNA, 21 nt, Artificial Sequence
  SAMD9 targeting guide sequence portion
aaaauguuggggaaucuauac

SEQ ID NO: 9498 - RNA, 21 nt, Artificial Sequence
  SAMD9 targeting guide sequence portion
aaagaaauugcaaaggaccaa

SEQ ID NO: 9499 - RNA, 21 nt, Artificial Sequence
  SAMD9 targeting guide sequence portion
aaauguuggggaaucuauaca

SEQ ID NO: 9500 - RNA, 21 nt, Artificial Sequence
  SAMD9 targeting guide sequence portion
aaauugcaaaggaccaaaaaa

SEQ ID NO: 9501 - RNA, 21 nt, Artificial Sequence
  SAMD9 targeting guide sequence portion
aagaaauugcaaaggaccaaa

SEQ ID NO: 9502 - RNA, 21 nt, Artificial Sequence
  SAMD9 targeting guide sequence portion
aauguauagauuccccaacau

SEQ ID NO: 9503 - RNA, 21 nt, Artificial Sequence
  SAMD9 targeting guide sequence portion
aauguuggggaaucuauacau

SEQ ID NO: 9504 - RNA, 21 nt, Artificial Sequence
  SAMD9 targeting guide sequence portion
agaaauugcaaaggaccaaaa

SEQ ID NO: 9505 - RNA, 21 nt, Artificial Sequence
  SAMD9 targeting guide sequence portion
auaauguauagauuccccaac

SEQ ID NO: 9506 - RNA, 21 nt, Artificial Sequence
  SAMD9 targeting guide sequence portion
auagauuccccaacauuuuuu

SEQ ID NO: 9507 - RNA, 21 nt, Artificial Sequence
  SAMD9 targeting guide sequence portion
auguauagauuccccaacauu

SEQ ID NO: 9508 - RNA, 21 nt, Artificial Sequence
  SAMD9 targeting guide sequence portion
auguuggggaaucuauacauu

SEQ ID NO: 9509 - RNA, 21 nt, Artificial Sequence
  SAMD9 targeting guide sequence portion
ccuuauaauguauagauuccc

SEQ ID NO: 9510 - RNA, 21 nt, Artificial Sequence
  SAMD9 targeting guide sequence portion
cuuauaauguauagauucccc

SEQ ID NO: 9511 - RNA, 21 nt, Artificial Sequence
  SAMD9 targeting guide sequence portion
gaaagaaauugcaaaggacca

SEQ ID NO: 9512 - RNA, 21 nt, Artificial Sequence
  SAMD9 targeting guide sequence portion
gaaauugcaaaggaccaaaaa

SEQ ID NO: 9513 - RNA, 21 nt, Artificial Sequence
  SAMD9 targeting guide sequence portion
guauagauuccccaacauuuu

SEQ ID NO: 9514 - RNA, 21 nt, Artificial Sequence
  SAMD9 targeting guide sequence portion
uaauguauagauuccccaaca

SEQ ID NO: 9515 - RNA, 21 nt, Artificial Sequence
  SAMD9 targeting guide sequence portion
uauaauguauagauuccccaa

SEQ ID NO: 9516 - RNA, 21 nt, Artificial Sequence
  SAMD9 targeting guide sequence portion
uauagauuccccaacauuuuu

SEQ ID NO: 9517 - RNA, 21 nt, Artificial Sequence
  SAMD9 targeting guide sequence portion
uguauagauuccccaacauuu

SEQ ID NO: 9518 - RNA, 21 nt, Artificial Sequence
  SAMD9 targeting guide sequence portion
uuauaauguauagauucccca

SEQ ID NO: 9519 - RNA, 22 nt, Artificial Sequence
  SAMD9 targeting guide sequence portion
aaaaaauguuggggaaucuaua

SEQ ID NO: 9520 - RNA, 22 nt, Artificial Sequence
  SAMD9 targeting guide sequence portion
aaaaauguuggggaaucuauac

SEQ ID NO: 9521 - RNA, 22 nt, Artificial Sequence
  SAMD9 targeting guide sequence portion
aaaauguuggggaaucuauaca

SEQ ID NO: 9522 - RNA, 22 nt, Artificial Sequence
  SAMD9 targeting guide sequence portion
aaagaaauugcaaaggaccaaa

SEQ ID NO: 9523 - RNA, 22 nt, Artificial Sequence
  SAMD9 targeting guide sequence portion
aaauguuggggaaucuauacau

SEQ ID NO: 9524 - RNA, 22 nt, Artificial Sequence
  SAMD9 targeting guide sequence portion
aagaaauugcaaaggaccaaaa

SEQ ID NO: 9525 - RNA, 22 nt, Artificial Sequence
  SAMD9 targeting guide sequence portion
aauguauagauuccccaacauu

SEQ ID NO: 9526 - RNA, 22 nt, Artificial Sequence
  SAMD9 targeting guide sequence portion
aauguuggggaaucuauacauu

SEQ ID NO: 9527 - RNA, 22 nt, Artificial Sequence
  SAMD9 targeting guide sequence portion
agaaagaaauugcaaaggacca

SEQ ID NO: 9528 - RNA, 22 nt, Artificial Sequence
  SAMD9 targeting guide sequence portion
agaaauugcaaaggaccaaaaa

SEQ ID NO: 9529 - RNA, 22 nt, Artificial Sequence
  SAMD9 targeting guide sequence portion
auaauguauagauuccccaaca

SEQ ID NO: 9530 - RNA, 22 nt, Artificial Sequence
  SAMD9 targeting guide sequence portion
auguauagauuccccaacauuu

SEQ ID NO: 9531 - RNA, 22 nt, Artificial Sequence
  SAMD9 targeting guide sequence portion
auguuggggaaucuauacauua

SEQ ID NO: 9532 - RNA, 22 nt, Artificial Sequence
  SAMD9 targeting guide sequence portion
cccuuauaauguauagauuccc

SEQ ID NO: 9533 - RNA, 22 nt, Artificial Sequence
  SAMD9 targeting guide sequence portion
ccuuauaauguauagauucccc

SEQ ID NO: 9534 - RNA, 22 nt, Artificial Sequence
  SAMD9 targeting guide sequence portion
cuuauaauguauagauucccca

SEQ ID NO: 9535 - RNA, 22 nt, Artificial Sequence
  SAMD9 targeting guide sequence portion
gaaagaaauugcaaaggaccaa

SEQ ID NO: 9536 - RNA, 22 nt, Artificial Sequence
  SAMD9 targeting guide sequence portion
gaaauugcaaaggaccaaaaaa

SEQ ID NO: 9537 - RNA, 22 nt, Artificial Sequence
  SAMD9 targeting guide sequence portion
guauagauuccccaacauuuuu

SEQ ID NO: 9538 - RNA, 22 nt, Artificial Sequence
  SAMD9 targeting guide sequence portion
uaauguauagauuccccaacau

SEQ ID NO: 9539 - RNA, 22 nt, Artificial Sequence
  SAMD9 targeting guide sequence portion
uauaauguauagauuccccaac

SEQ ID NO: 9540 - RNA, 22 nt, Artificial Sequence
  SAMD9 targeting guide sequence portion
uauagauuccccaacauuuuuu

SEQ ID NO: 9541 - RNA, 22 nt, Artificial Sequence
  SAMD9 targeting guide sequence portion
uguauagauuccccaacauuuu

SEQ ID NO: 9542 - RNA, 22 nt, Artificial Sequence
  SAMD9 targeting guide sequence portion
uuauaauguauagauuccccaa

SEQ ID NO: 9543 - RNA, 20 nt, Artificial Sequence
  SAMD9 targeting guide sequence portion
aaaaaaguguuggggaaucu

SEQ ID NO: 9544 - RNA, 20 nt, Artificial Sequence
  SAMD9 targeting guide sequence portion
aaaaaguguuggggaaucua

SEQ ID NO: 9545 - RNA, 20 nt, Artificial Sequence
  SAMD9 targeting guide sequence portion
aaaaguguuggggaaucuau

SEQ ID NO: 9546 - RNA, 20 nt, Artificial Sequence
  SAMD9 targeting guide sequence portion
aaaggaccaaaaaaguguug

SEQ ID NO: 9547 - RNA, 20 nt, Artificial Sequence
  SAMD9 targeting guide sequence portion
aaaguguuggggaaucuaua

SEQ ID NO: 9548 - RNA, 20 nt, Artificial Sequence
  SAMD9 targeting guide sequence portion
aacacuuuuuugguccuuug

SEQ ID NO: 9549 - RNA, 20 nt, Artificial Sequence
  SAMD9 targeting guide sequence portion
aaggaccaaaaaaguguugg

SEQ ID NO: 9550 - RNA, 20 nt, Artificial Sequence
  SAMD9 targeting guide sequence portion
aaguguuggggaaucuauac

SEQ ID NO: 9551 - RNA, 20 nt, Artificial Sequence
  SAMD9 targeting guide sequence portion
acacuuuuuugguccuuugc

SEQ ID NO: 9552 - RNA, 20 nt, Artificial Sequence
  SAMD9 targeting guide sequence portion
accaaaaaaguguuggggaa

SEQ ID NO: 9553 - RNA, 20 nt, Artificial Sequence
  SAMD9 targeting guide sequence portion
acuuuuuugguccuuugcaa

SEQ ID NO: 9554 - RNA, 20 nt, Artificial Sequence
  SAMD9 targeting guide sequence portion
agauuccccaacacuuuuuu

SEQ ID NO: 9555 - RNA, 20 nt, Artificial Sequence
  SAMD9 targeting guide sequence portion
aggaccaaaaaaguguuggg

SEQ ID NO: 9556 - RNA, 20 nt, Artificial Sequence
  SAMD9 targeting guide sequence portion
aguguuggggaaucuauaca

SEQ ID NO: 9557 - RNA, 20 nt, Artificial Sequence
  SAMD9 targeting guide sequence portion
auagauuccccaacacuuuu

SEQ ID NO: 9558 - RNA, 20 nt, Artificial Sequence
  SAMD9 targeting guide sequence portion
auguauagauuccccaacac

SEQ ID NO: 9559 - RNA, 20 nt, Artificial Sequence
  SAMD9 targeting guide sequence portion
auuccccaacacuuuuuugg

SEQ ID NO: 9560 - RNA, 20 nt, Artificial Sequence
  SAMD9 targeting guide sequence portion
auugcaaaggaccaaaaaag

SEQ ID NO: 9561 - RNA, 20 nt, Artificial Sequence
  SAMD9 targeting guide sequence portion
caaaaaaguguuggggaauc

SEQ ID NO: 9562 - RNA, 20 nt, Artificial Sequence
  SAMD9 targeting guide sequence portion
caaaggaccaaaaaaguguu

SEQ ID NO: 9563 - RNA, 20 nt, Artificial Sequence
  SAMD9 targeting guide sequence portion
caacacuuuuuugguccuuu

SEQ ID NO: 9564 - RNA, 20 nt, Artificial Sequence
  SAMD9 targeting guide sequence portion
cacuuuuuugguccuuugca

SEQ ID NO: 9565 - RNA, 20 nt, Artificial Sequence
  SAMD9 targeting guide sequence portion
ccaaaaaaguguuggggaau

SEQ ID NO: 9566 - RNA, 20 nt, Artificial Sequence
  SAMD9 targeting guide sequence portion
ccaacacuuuuuugguccuu

SEQ ID NO: 9567 - RNA, 20 nt, Artificial Sequence
  SAMD9 targeting guide sequence portion
cccaacacuuuuuugguccu

SEQ ID NO: 9568 - RNA, 20 nt, Artificial Sequence
  SAMD9 targeting guide sequence portion
ccccaacacuuuuuuggucc

SEQ ID NO: 9569 - RNA, 20 nt, Artificial Sequence
  SAMD9 targeting guide sequence portion
cuuuuuugguccuuugcaau

SEQ ID NO: 9570 - RNA, 20 nt, Artificial Sequence
  SAMD9 targeting guide sequence portion
gaccaaaaaaguguugggga

SEQ ID NO: 9571 - RNA, 20 nt, Artificial Sequence
  SAMD9 targeting guide sequence portion
gauuccccaacacuuuuuug

SEQ ID NO: 9572 - RNA, 20 nt, Artificial Sequence
  SAMD9 targeting guide sequence portion
gcaaaggaccaaaaaagugu

SEQ ID NO: 9573 - RNA, 20 nt, Artificial Sequence
  SAMD9 targeting guide sequence portion
ggaccaaaaaaguguugggg

SEQ ID NO: 9574 - RNA, 20 nt, Artificial Sequence
  SAMD9 targeting guide sequence portion
guauagauuccccaacacuu

SEQ ID NO: 9575 - RNA, 20 nt, Artificial Sequence
  SAMD9 targeting guide sequence portion
guguuggggaaucuauacau

SEQ ID NO: 9576 - RNA, 20 nt, Artificial Sequence
  SAMD9 targeting guide sequence portion
uagauuccccaacacuuuuu

SEQ ID NO: 9577 - RNA, 20 nt, Artificial Sequence
  SAMD9 targeting guide sequence portion
uauagauuccccaacacuuu

SEQ ID NO: 9578 - RNA, 20 nt, Artificial Sequence
  SAMD9 targeting guide sequence portion
uccccaacacuuuuuugguc

SEQ ID NO: 9579 - RNA, 20 nt, Artificial Sequence
  SAMD9 targeting guide sequence portion
ugcaaaggaccaaaaaagug

SEQ ID NO: 9580 - RNA, 20 nt, Artificial Sequence
  SAMD9 targeting guide sequence portion
uguauagauuccccaacacu

SEQ ID NO: 9581 - RNA, 20 nt, Artificial Sequence
  SAMD9 targeting guide sequence portion
uuccccaacacuuuuuuggu

SEQ ID NO: 9582 - RNA, 20 nt, Artificial Sequence
  SAMD9 targeting guide sequence portion
uugcaaaggaccaaaaaagu

SEQ ID NO: 9583 - RNA, 21 nt, Artificial Sequence
  SAMD9 targeting guide sequence portion
aaaaaaguguuggggaaucua

SEQ ID NO: 9584 - RNA, 21 nt, Artificial Sequence
  SAMD9 targeting guide sequence portion
aaaaaguguuggggaaucuau

SEQ ID NO: 9585 - RNA, 21 nt, Artificial Sequence
  SAMD9 targeting guide sequence portion
aaaaguguuggggaaucuaua

SEQ ID NO: 9586 - RNA, 21 nt, Artificial Sequence
  SAMD9 targeting guide sequence portion
aaaggaccaaaaaaguguugg

SEQ ID NO: 9587 - RNA, 21 nt, Artificial Sequence
  SAMD9 targeting guide sequence portion
aaaguguuggggaaucuauac

SEQ ID NO: 9588 - RNA, 21 nt, Artificial Sequence
  SAMD9 targeting guide sequence portion
aacacuuuuuugguccuuugc

SEQ ID NO: 9589 - RNA, 21 nt, Artificial Sequence
  SAMD9 targeting guide sequence portion
aaggaccaaaaaaguguuggg

SEQ ID NO: 9590 - RNA, 21 nt, Artificial Sequence
  SAMD9 targeting guide sequence portion
aaguguuggggaaucuauaca

SEQ ID NO: 9591 - RNA, 21 nt, Artificial Sequence
  SAMD9 targeting guide sequence portion
aauguauagauuccccaacac

SEQ ID NO: 9592 - RNA, 21 nt, Artificial Sequence
  SAMD9 targeting guide sequence portion
aauugcaaaggaccaaaaaag

SEQ ID NO: 9593 - RNA, 21 nt, Artificial Sequence
  SAMD9 targeting guide sequence portion
acacuuuuuugguccuuugca

SEQ ID NO: 9594 - RNA, 21 nt, Artificial Sequence
  SAMD9 targeting guide sequence portion
accaaaaaaguguuggggaau

SEQ ID NO: 9595 - RNA, 21 nt, Artificial Sequence
  SAMD9 targeting guide sequence portion
acuuuuuugguccuuugcaau

SEQ ID NO: 9596 - RNA, 21 nt, Artificial Sequence
  SAMD9 targeting guide sequence portion
agauuccccaacacuuuuuug

SEQ ID NO: 9597 - RNA, 21 nt, Artificial Sequence
  SAMD9 targeting guide sequence portion
aggaccaaaaaaguguugggg

SEQ ID NO: 9598 - RNA, 21 nt, Artificial Sequence
  SAMD9 targeting guide sequence portion
aguguuggggaaucuauacau

SEQ ID NO: 9599 - RNA, 21 nt, Artificial Sequence
  SAMD9 targeting guide sequence portion
auagauuccccaacacuuuuu

SEQ ID NO: 9600 - RNA, 21 nt, Artificial Sequence
  SAMD9 targeting guide sequence portion
auguauagauuccccaacacu

SEQ ID NO: 9601 - RNA, 21 nt, Artificial Sequence
  SAMD9 targeting guide sequence portion
auuccccaacacuuuuuuggu

SEQ ID NO: 9602 - RNA, 21 nt, Artificial Sequence
  SAMD9 targeting guide sequence portion
auugcaaaggaccaaaaaagu

SEQ ID NO: 9603 - RNA, 21 nt, Artificial Sequence
  SAMD9 targeting guide sequence portion
caaaaaaguguuggggaaucu

SEQ ID NO: 9604 - RNA, 21 nt, Artificial Sequence
  SAMD9 targeting guide sequence portion
caaaggaccaaaaaaguguug

SEQ ID NO: 9605 - RNA, 21 nt, Artificial Sequence
  SAMD9 targeting guide sequence portion
caacacuuuuuugguccuuug

SEQ ID NO: 9606 - RNA, 21 nt, Artificial Sequence
  SAMD9 targeting guide sequence portion
cacuuuuuugguccuuugcaa

SEQ ID NO: 9607 - RNA, 21 nt, Artificial Sequence
  SAMD9 targeting guide sequence portion
ccaaaaaaguguuggggaauc

SEQ ID NO: 9608 - RNA, 21 nt, Artificial Sequence
  SAMD9 targeting guide sequence portion
ccaacacuuuuuugguccuuu

SEQ ID NO: 9609 - RNA, 21 nt, Artificial Sequence
  SAMD9 targeting guide sequence portion
cccaacacuuuuuugguccuu

SEQ ID NO: 9610 - RNA, 21 nt, Artificial Sequence
  SAMD9 targeting guide sequence portion
ccccaacacuuuuuugguccu

SEQ ID NO: 9611 - RNA, 21 nt, Artificial Sequence
  SAMD9 targeting guide sequence portion
cuuuuuugguccuuugcaauu

SEQ ID NO: 9612 - RNA, 21 nt, Artificial Sequence
  SAMD9 targeting guide sequence portion
gaccaaaaaaguguuggggaa

SEQ ID NO: 9613 - RNA, 21 nt, Artificial Sequence
  SAMD9 targeting guide sequence portion
gauuccccaacacuuuuuugg

SEQ ID NO: 9614 - RNA, 21 nt, Artificial Sequence
  SAMD9 targeting guide sequence portion
gcaaaggaccaaaaaaguguu

SEQ ID NO: 9615 - RNA, 21 nt, Artificial Sequence
  SAMD9 targeting guide sequence portion
ggaccaaaaaaguguugggga

SEQ ID NO: 9616 - RNA, 21 nt, Artificial Sequence
  SAMD9 targeting guide sequence portion
guauagauuccccaacacuuu

SEQ ID NO: 9617 - RNA, 21 nt, Artificial Sequence
  SAMD9 targeting guide sequence portion
guguuggggaaucuauacauu

SEQ ID NO: 9618 - RNA, 21 nt, Artificial Sequence
  SAMD9 targeting guide sequence portion
uagauuccccaacacuuuuuu

SEQ ID NO: 9619 - RNA, 21 nt, Artificial Sequence
  SAMD9 targeting guide sequence portion
uauagauuccccaacacuuuu

SEQ ID NO: 9620 - RNA, 21 nt, Artificial Sequence
  SAMD9 targeting guide sequence portion
uccccaacacuuuuuuggucc

SEQ ID NO: 9621 - RNA, 21 nt, Artificial Sequence
  SAMD9 targeting guide sequence portion
ugcaaaggaccaaaaaagugu

SEQ ID NO: 9622 - RNA, 21 nt, Artificial Sequence
  SAMD9 targeting guide sequence portion
uguauagauuccccaacacuu

SEQ ID NO: 9623 - RNA, 21 nt, Artificial Sequence
  SAMD9 targeting guide sequence portion
uuccccaacacuuuuuugguc

SEQ ID NO: 9624 - RNA, 21 nt, Artificial Sequence
  SAMD9 targeting guide sequence portion
uugcaaaggaccaaaaaagug

SEQ ID NO: 9625 - RNA, 22 nt, Artificial Sequence
  SAMD9 targeting guide sequence portion
aaaaaaguguuggggaaucuau

SEQ ID NO: 9626 - RNA, 22 nt, Artificial Sequence
  SAMD9 targeting guide sequence portion
aaaaaguguuggggaaucuaua

SEQ ID NO: 9627 - RNA, 22 nt, Artificial Sequence
  SAMD9 targeting guide sequence portion
aaaaguguuggggaaucuauac

SEQ ID NO: 9628 - RNA, 22 nt, Artificial Sequence
  SAMD9 targeting guide sequence portion
aaaggaccaaaaaaguguuggg

SEQ ID NO: 9629 - RNA, 22 nt, Artificial Sequence
  SAMD9 targeting guide sequence portion
aaaguguuggggaaucuauaca

SEQ ID NO: 9630 - RNA, 22 nt, Artificial Sequence
  SAMD9 targeting guide sequence portion
aaauugcaaaggaccaaaaaag

SEQ ID NO: 9631 - RNA, 22 nt, Artificial Sequence
  SAMD9 targeting guide sequence portion
aacacuuuuuugguccuuugca

SEQ ID NO: 9632 - RNA, 22 nt, Artificial Sequence
  SAMD9 targeting guide sequence portion
aaggaccaaaaaaguguugggg

SEQ ID NO: 9633 - RNA, 22 nt, Artificial Sequence
  SAMD9 targeting guide sequence portion
aaguguuggggaaucuauacau

SEQ ID NO: 9634 - RNA, 22 nt, Artificial Sequence
  SAMD9 targeting guide sequence portion
aauguauagauuccccaacacu

SEQ ID NO: 9635 - RNA, 22 nt, Artificial Sequence
  SAMD9 targeting guide sequence portion
aauugcaaaggaccaaaaaagu

SEQ ID NO: 9636 - RNA, 22 nt, Artificial Sequence
  SAMD9 targeting guide sequence portion
acacuuuuuugguccuuugcaa

SEQ ID NO: 9637 - RNA, 22 nt, Artificial Sequence
  SAMD9 targeting guide sequence portion
accaaaaaaguguuggggaauc

SEQ ID NO: 9638 - RNA, 22 nt, Artificial Sequence
  SAMD9 targeting guide sequence portion
acuuuuuugguccuuugcaauu

SEQ ID NO: 9639 - RNA, 22 nt, Artificial Sequence
  SAMD9 targeting guide sequence portion
agauuccccaacacuuuuuugg

SEQ ID NO: 9640 - RNA, 22 nt, Artificial Sequence
  SAMD9 targeting guide sequence portion
aggaccaaaaaaguguugggga

SEQ ID NO: 9641 - RNA, 22 nt, Artificial Sequence
  SAMD9 targeting guide sequence portion
aguguuggggaaucuauacauu

SEQ ID NO: 9642 - RNA, 22 nt, Artificial Sequence
  SAMD9 targeting guide sequence portion
auagauuccccaacacuuuuuu

SEQ ID NO: 9643 - RNA, 22 nt, Artificial Sequence
  SAMD9 targeting guide sequence portion
auguauagauuccccaacacuu

SEQ ID NO: 9644 - RNA, 22 nt, Artificial Sequence
  SAMD9 targeting guide sequence portion
auuccccaacacuuuuuugguc

SEQ ID NO: 9645 - RNA, 22 nt, Artificial Sequence
  SAMD9 targeting guide sequence portion
auugcaaaggaccaaaaaagug

SEQ ID NO: 9646 - RNA, 22 nt, Artificial Sequence
  SAMD9 targeting guide sequence portion
caaaaaaguguuggggaaucua

SEQ ID NO: 9647 - RNA, 22 nt, Artificial Sequence
  SAMD9 targeting guide sequence portion
caaaggaccaaaaaaguguugg

SEQ ID NO: 9648 - RNA, 22 nt, Artificial Sequence
  SAMD9 targeting guide sequence portion
caacacuuuuuugguccuuugc

SEQ ID NO: 9649 - RNA, 22 nt, Artificial Sequence
  SAMD9 targeting guide sequence portion
cacuuuuuugguccuuugcaau

SEQ ID NO: 9650 - RNA, 22 nt, Artificial Sequence
  SAMD9 targeting guide sequence portion
ccaaaaaaguguuggggaaucu

SEQ ID NO: 9651 - RNA, 22 nt, Artificial Sequence
  SAMD9 targeting guide sequence portion
ccaacacuuuuuugguccuuug

SEQ ID NO: 9652 - RNA, 22 nt, Artificial Sequence
  SAMD9 targeting guide sequence portion
cccaacacuuuuuugguccuuu

SEQ ID NO: 9653 - RNA, 22 nt, Artificial Sequence
  SAMD9 targeting guide sequence portion
ccccaacacuuuuuugguccuu

SEQ ID NO: 9654 - RNA, 22 nt, Artificial Sequence
  SAMD9 targeting guide sequence portion
cuuuuuugguccuuugcaauuu

SEQ ID NO: 9655 - RNA, 22 nt, Artificial Sequence
  SAMD9 targeting guide sequence portion
gaccaaaaaaguguuggggaau

SEQ ID NO: 9656 - RNA, 22 nt, Artificial Sequence
  SAMD9 targeting guide sequence portion
gauuccccaacacuuuuuuggu

SEQ ID NO: 9657 - RNA, 22 nt, Artificial Sequence
  SAMD9 targeting guide sequence portion
gcaaaggaccaaaaaaguguug

SEQ ID NO: 9658 - RNA, 22 nt, Artificial Sequence
  SAMD9 targeting guide sequence portion
ggaccaaaaaaguguuggggaa

SEQ ID NO: 9659 - RNA, 22 nt, Artificial Sequence
  SAMD9 targeting guide sequence portion
guauagauuccccaacacuuuu

SEQ ID NO: 9660 - RNA, 22 nt, Artificial Sequence
  SAMD9 targeting guide sequence portion
guguuggggaaucuauacauua

SEQ ID NO: 9661 - RNA, 22 nt, Artificial Sequence
  SAMD9 targeting guide sequence portion
uaauguauagauuccccaacac

SEQ ID NO: 9662 - RNA, 22 nt, Artificial Sequence
  SAMD9 targeting guide sequence portion
uagauuccccaacacuuuuuug

SEQ ID NO: 9663 - RNA, 22 nt, Artificial Sequence
  SAMD9 targeting guide sequence portion
uauagauuccccaacacuuuuu

SEQ ID NO: 9664 - RNA, 22 nt, Artificial Sequence
  SAMD9 targeting guide sequence portion
uccccaacacuuuuuugguccu

SEQ ID NO: 9665 - RNA, 22 nt, Artificial Sequence
  SAMD9 targeting guide sequence portion
ugcaaaggaccaaaaaaguguu

SEQ ID NO: 9666 - RNA, 22 nt, Artificial Sequence
  SAMD9 targeting guide sequence portion
uguauagauuccccaacacuuu

SEQ ID NO: 9667 - RNA, 22 nt, Artificial Sequence
  SAMD9 targeting guide sequence portion
uuccccaacacuuuuuuggucc

SEQ ID NO: 9668 - RNA, 22 nt, Artificial Sequence
  SAMD9 targeting guide sequence portion
uugcaaaggaccaaaaaagugu

SEQ ID NO: 9669 - RNA, 20 nt, Artificial Sequence
  SAMD9 targeting guide sequence portion
aaaauuucuuuugaauugca

SEQ ID NO: 9670 - RNA, 20 nt, Artificial Sequence
  SAMD9 targeting guide sequence portion
aaauuucuuuugaauugcaa

SEQ ID NO: 9671 - RNA, 20 nt, Artificial Sequence
  SAMD9 targeting guide sequence portion
aauugcaaauaagauccaga

SEQ ID NO: 9672 - RNA, 20 nt, Artificial Sequence
  SAMD9 targeting guide sequence portion
aauuucuuuugaauugcaaa

SEQ ID NO: 9673 - RNA, 20 nt, Artificial Sequence
  SAMD9 targeting guide sequence portion
aggucucuggaucuuauuug

SEQ ID NO: 9674 - RNA, 20 nt, Artificial Sequence
  SAMD9 targeting guide sequence portion
aucaggucucuggaucuuau

SEQ ID NO: 9675 - RNA, 20 nt, Artificial Sequence
  SAMD9 targeting guide sequence portion
aucuuauuugcaauucaaaa

SEQ ID NO: 9676 - RNA, 20 nt, Artificial Sequence
  SAMD9 targeting guide sequence portion
auugcaaauaagauccagag

SEQ ID NO: 9677 - RNA, 20 nt, Artificial Sequence
  SAMD9 targeting guide sequence portion
auuucuuuugaauugcaaau

SEQ ID NO: 9678 - RNA, 20 nt, Artificial Sequence
  SAMD9 targeting guide sequence portion
auuugcaauucaaaagaaau

SEQ ID NO: 9679 - RNA, 20 nt, Artificial Sequence
  SAMD9 targeting guide sequence portion
caggucucuggaucuuauuu

SEQ ID NO: 9680 - RNA, 20 nt, Artificial Sequence
  SAMD9 targeting guide sequence portion
cucuggaucuuauuugcaau

SEQ ID NO: 9681 - RNA, 20 nt, Artificial Sequence
  SAMD9 targeting guide sequence portion
cuggaucuuauuugcaauuc

SEQ ID NO: 9682 - RNA, 20 nt, Artificial Sequence
  SAMD9 targeting guide sequence portion
cuuauuugcaauucaaaaga

SEQ ID NO: 9683 - RNA, 20 nt, Artificial Sequence
  SAMD9 targeting guide sequence portion
cuuuugaauugcaaauaaga

SEQ ID NO: 9684 - RNA, 20 nt, Artificial Sequence
  SAMD9 targeting guide sequence portion
gaauugcaaauaagauccag

SEQ ID NO: 9685 - RNA, 20 nt, Artificial Sequence
  SAMD9 targeting guide sequence portion
gaucaggucucuggaucuua

SEQ ID NO: 9686 - RNA, 20 nt, Artificial Sequence
  SAMD9 targeting guide sequence portion
gaucuuauuugcaauucaaa

SEQ ID NO: 9687 - RNA, 20 nt, Artificial Sequence
  SAMD9 targeting guide sequence portion
gcaaauaagauccagagacc

SEQ ID NO: 9688 - RNA, 20 nt, Artificial Sequence
  SAMD9 targeting guide sequence portion
gcaauucaaaagaaauuuua

SEQ ID NO: 9689 - RNA, 20 nt, Artificial Sequence
  SAMD9 targeting guide sequence portion
ggaucuuauuugcaauucaa

SEQ ID NO: 9690 - RNA, 20 nt, Artificial Sequence
  SAMD9 targeting guide sequence portion
ggucucuggaucuuauuugc

SEQ ID NO: 9691 - RNA, 20 nt, Artificial Sequence
  SAMD9 targeting guide sequence portion
gucucuggaucuuauuugca

SEQ ID NO: 9692 - RNA, 20 nt, Artificial Sequence
  SAMD9 targeting guide sequence portion
uaaaauuucuuuugaauugc

SEQ ID NO: 9693 - RNA, 20 nt, Artificial Sequence
  SAMD9 targeting guide sequence portion
uauuugcaauucaaaagaaa

SEQ ID NO: 9694 - RNA, 20 nt, Artificial Sequence
  SAMD9 targeting guide sequence portion
ucaggucucuggaucuuauu

SEQ ID NO: 9695 - RNA, 20 nt, Artificial Sequence
  SAMD9 targeting guide sequence portion
ucucuggaucuuauuugcaa

SEQ ID NO: 9696 - RNA, 20 nt, Artificial Sequence
  SAMD9 targeting guide sequence portion
ucuggaucuuauuugcaauu

SEQ ID NO: 9697 - RNA, 20 nt, Artificial Sequence
  SAMD9 targeting guide sequence portion
ucuuauuugcaauucaaaag

SEQ ID NO: 9698 - RNA, 20 nt, Artificial Sequence
  SAMD9 targeting guide sequence portion
ucuuuugaauugcaaauaag

SEQ ID NO: 9699 - RNA, 20 nt, Artificial Sequence
  SAMD9 targeting guide sequence portion
ugaauugcaaauaagaucca

SEQ ID NO: 9700 - RNA, 20 nt, Artificial Sequence
  SAMD9 targeting guide sequence portion
ugaucaggucucuggaucuu

SEQ ID NO: 9701 - RNA, 20 nt, Artificial Sequence
  SAMD9 targeting guide sequence portion
ugcaaauaagauccagagac

SEQ ID NO: 9702 - RNA, 20 nt, Artificial Sequence
  SAMD9 targeting guide sequence portion
ugcaauucaaaagaaauuuu

SEQ ID NO: 9703 - RNA, 20 nt, Artificial Sequence
  SAMD9 targeting guide sequence portion
uggaucuuauuugcaauuca

SEQ ID NO: 9704 - RNA, 20 nt, Artificial Sequence
  SAMD9 targeting guide sequence portion
uuauuugcaauucaaaagaa

SEQ ID NO: 9705 - RNA, 20 nt, Artificial Sequence
  SAMD9 targeting guide sequence portion
uucuuuugaauugcaaauaa

SEQ ID NO: 9706 - RNA, 20 nt, Artificial Sequence
  SAMD9 targeting guide sequence portion
uugaauugcaaauaagaucc

SEQ ID NO: 9707 - RNA, 20 nt, Artificial Sequence
  SAMD9 targeting guide sequence portion
uugcaaauaagauccagaga

SEQ ID NO: 9708 - RNA, 20 nt, Artificial Sequence
  SAMD9 targeting guide sequence portion
uugcaauucaaaagaaauuu

SEQ ID NO: 9709 - RNA, 20 nt, Artificial Sequence
  SAMD9 targeting guide sequence portion
uuucuuuugaauugcaaaua

SEQ ID NO: 9710 - RNA, 20 nt, Artificial Sequence
  SAMD9 targeting guide sequence portion
uuugaauugcaaauaagauc

SEQ ID NO: 9711 - RNA, 20 nt, Artificial Sequence
  SAMD9 targeting guide sequence portion
uuugcaauucaaaagaaauu

SEQ ID NO: 9712 - RNA, 20 nt, Artificial Sequence
  SAMD9 targeting guide sequence portion
uuuugaauugcaaauaagau

SEQ ID NO: 9713 - RNA, 21 nt, Artificial Sequence
  SAMD9 targeting guide sequence portion
aauugcaaauaagauccagag

SEQ ID NO: 9714 - RNA, 21 nt, Artificial Sequence
  SAMD9 targeting guide sequence portion
aggucucuggaucuuauuugc

SEQ ID NO: 9715 - RNA, 21 nt, Artificial Sequence
  SAMD9 targeting guide sequence portion
aucaggucucuggaucuuauu

SEQ ID NO: 9716 - RNA, 21 nt, Artificial Sequence
  SAMD9 targeting guide sequence portion
aucuuauuugcaauucaaaag

SEQ ID NO: 9717 - RNA, 21 nt, Artificial Sequence
  SAMD9 targeting guide sequence portion
auugcaaauaagauccagaga

SEQ ID NO: 9718 - RNA, 21 nt, Artificial Sequence
  SAMD9 targeting guide sequence portion
caggucucuggaucuuauuug

SEQ ID NO: 9719 - RNA, 21 nt, Artificial Sequence
  SAMD9 targeting guide sequence portion
cucuggaucuuauuugcaauu

SEQ ID NO: 9720 - RNA, 21 nt, Artificial Sequence
  SAMD9 targeting guide sequence portion
cuggaucuuauuugcaauuca

SEQ ID NO: 9721 - RNA, 21 nt, Artificial Sequence
  SAMD9 targeting guide sequence portion
cuuauuugcaauucaaaagaa

SEQ ID NO: 9722 - RNA, 21 nt, Artificial Sequence
  SAMD9 targeting guide sequence portion
cuuuugaauugcaaauaagau

SEQ ID NO: 9723 - RNA, 21 nt, Artificial Sequence
  SAMD9 targeting guide sequence portion
gaauugcaaauaagauccaga

SEQ ID NO: 9724 - RNA, 21 nt, Artificial Sequence
  SAMD9 targeting guide sequence portion
gaucaggucucuggaucuuau

SEQ ID NO: 9725 - RNA, 21 nt, Artificial Sequence
  SAMD9 targeting guide sequence portion
gaucuuauuugcaauucaaaa

SEQ ID NO: 9726 - RNA, 21 nt, Artificial Sequence
  SAMD9 targeting guide sequence portion
gcaaauaagauccagagaccu

SEQ ID NO: 9727 - RNA, 21 nt, Artificial Sequence
  SAMD9 targeting guide sequence portion
ggaucuuauuugcaauucaaa

SEQ ID NO: 9728 - RNA, 21 nt, Artificial Sequence
  SAMD9 targeting guide sequence portion
ggucucuggaucuuauuugca

SEQ ID NO: 9729 - RNA, 21 nt, Artificial Sequence
  SAMD9 targeting guide sequence portion
gucucuggaucuuauuugcaa

SEQ ID NO: 9730 - RNA, 21 nt, Artificial Sequence
  SAMD9 targeting guide sequence portion
ucaggucucuggaucuuauuu

SEQ ID NO: 9731 - RNA, 21 nt, Artificial Sequence
  SAMD9 targeting guide sequence portion
ucucuggaucuuauuugcaau

SEQ ID NO: 9732 - RNA, 21 nt, Artificial Sequence
  SAMD9 targeting guide sequence portion
ucuggaucuuauuugcaauuc

SEQ ID NO: 9733 - RNA, 21 nt, Artificial Sequence
  SAMD9 targeting guide sequence portion
ucuuauuugcaauucaaaaga

SEQ ID NO: 9734 - RNA, 21 nt, Artificial Sequence
  SAMD9 targeting guide sequence portion
ucuuuugaauugcaaauaaga

SEQ ID NO: 9735 - RNA, 21 nt, Artificial Sequence
  SAMD9 targeting guide sequence portion
ugaauugcaaauaagauccag

SEQ ID NO: 9736 - RNA, 21 nt, Artificial Sequence
  SAMD9 targeting guide sequence portion
ugaucaggucucuggaucuua

SEQ ID NO: 9737 - RNA, 21 nt, Artificial Sequence
  SAMD9 targeting guide sequence portion
ugcaaauaagauccagagacc

SEQ ID NO: 9738 - RNA, 21 nt, Artificial Sequence
  SAMD9 targeting guide sequence portion
uggaucuuauuugcaauucaa

SEQ ID NO: 9739 - RNA, 21 nt, Artificial Sequence
  SAMD9 targeting guide sequence portion
uucuuuugaauugcaaauaag

SEQ ID NO: 9740 - RNA, 21 nt, Artificial Sequence
  SAMD9 targeting guide sequence portion
uugaauugcaaauaagaucca

SEQ ID NO: 9741 - RNA, 21 nt, Artificial Sequence
  SAMD9 targeting guide sequence portion
uugaucaggucucuggaucuu

SEQ ID NO: 9742 - RNA, 21 nt, Artificial Sequence
  SAMD9 targeting guide sequence portion
uugcaaauaagauccagagac

SEQ ID NO: 9743 - RNA, 21 nt, Artificial Sequence
  SAMD9 targeting guide sequence portion
uuugaauugcaaauaagaucc

SEQ ID NO: 9744 - RNA, 21 nt, Artificial Sequence
  SAMD9 targeting guide sequence portion
uuuugaauugcaaauaagauc

SEQ ID NO: 9745 - RNA, 22 nt, Artificial Sequence
  SAMD9 targeting guide sequence portion
aauugcaaauaagauccagaga

SEQ ID NO: 9746 - RNA, 22 nt, Artificial Sequence
  SAMD9 targeting guide sequence portion
aggucucuggaucuuauuugca

SEQ ID NO: 9747 - RNA, 22 nt, Artificial Sequence
  SAMD9 targeting guide sequence portion
aucaggucucuggaucuuauuu

SEQ ID NO: 9748 - RNA, 22 nt, Artificial Sequence
  SAMD9 targeting guide sequence portion
aucuuauuugcaauucaaaaga

SEQ ID NO: 9749 - RNA, 22 nt, Artificial Sequence
  SAMD9 targeting guide sequence portion
auugcaaauaagauccagagac

SEQ ID NO: 9750 - RNA, 22 nt, Artificial Sequence
  SAMD9 targeting guide sequence portion
caggucucuggaucuuauuugc

SEQ ID NO: 9751 - RNA, 22 nt, Artificial Sequence
  SAMD9 targeting guide sequence portion
cucuggaucuuauuugcaauuc

SEQ ID NO: 9752 - RNA, 22 nt, Artificial Sequence
  SAMD9 targeting guide sequence portion
cuggaucuuauuugcaauucaa

SEQ ID NO: 9753 - RNA, 22 nt, Artificial Sequence
  SAMD9 targeting guide sequence portion
cuuauuugcaauucaaaagaaa

SEQ ID NO: 9754 - RNA, 22 nt, Artificial Sequence
  SAMD9 targeting guide sequence portion
cuuuugaauugcaaauaagauc

SEQ ID NO: 9755 - RNA, 22 nt, Artificial Sequence
  SAMD9 targeting guide sequence portion
gaauugcaaauaagauccagag

SEQ ID NO: 9756 - RNA, 22 nt, Artificial Sequence
  SAMD9 targeting guide sequence portion
gaucaggucucuggaucuuauu

SEQ ID NO: 9757 - RNA, 22 nt, Artificial Sequence
  SAMD9 targeting guide sequence portion
gaucuuauuugcaauucaaaag

SEQ ID NO: 9758 - RNA, 22 nt, Artificial Sequence
  SAMD9 targeting guide sequence portion
gcaaauaagauccagagaccug

SEQ ID NO: 9759 - RNA, 22 nt, Artificial Sequence
  SAMD9 targeting guide sequence portion
ggaucuuauuugcaauucaaaa

SEQ ID NO: 9760 - RNA, 22 nt, Artificial Sequence
  SAMD9 targeting guide sequence portion
ggucucuggaucuuauuugcaa

SEQ ID NO: 9761 - RNA, 22 nt, Artificial Sequence
  SAMD9 targeting guide sequence portion
gucucuggaucuuauuugcaau

SEQ ID NO: 9762 - RNA, 22 nt, Artificial Sequence
  SAMD9 targeting guide sequence portion
ucaggucucuggaucuuauuug

SEQ ID NO: 9763 - RNA, 22 nt, Artificial Sequence
  SAMD9 targeting guide sequence portion
ucucuggaucuuauuugcaauu

SEQ ID NO: 9764 - RNA, 22 nt, Artificial Sequence
  SAMD9 targeting guide sequence portion
ucuggaucuuauuugcaauuca

SEQ ID NO: 9765 - RNA, 22 nt, Artificial Sequence
  SAMD9 targeting guide sequence portion
ucuuauuugcaauucaaaagaa

SEQ ID NO: 9766 - RNA, 22 nt, Artificial Sequence
  SAMD9 targeting guide sequence portion
ucuuuugaauugcaaauaagau

SEQ ID NO: 9767 - RNA, 22 nt, Artificial Sequence
  SAMD9 targeting guide sequence portion
ugaauugcaaauaagauccaga

SEQ ID NO: 9768 - RNA, 22 nt, Artificial Sequence
  SAMD9 targeting guide sequence portion
ugaucaggucucuggaucuuau

SEQ ID NO: 9769 - RNA, 22 nt, Artificial Sequence
  SAMD9 targeting guide sequence portion
ugcaaauaagauccagagaccu

SEQ ID NO: 9770 - RNA, 22 nt, Artificial Sequence
  SAMD9 targeting guide sequence portion
uggaucuuauuugcaauucaaa

SEQ ID NO: 9771 - RNA, 22 nt, Artificial Sequence
  SAMD9 targeting guide sequence portion
uucuuuugaauugcaaauaaga

SEQ ID NO: 9772 - RNA, 22 nt, Artificial Sequence
  SAMD9 targeting guide sequence portion
uugaauugcaaauaagauccag

SEQ ID NO: 9773 - RNA, 22 nt, Artificial Sequence
  SAMD9 targeting guide sequence portion
uugaucaggucucuggaucuua

SEQ ID NO: 9774 - RNA, 22 nt, Artificial Sequence
  SAMD9 targeting guide sequence portion
uugcaaauaagauccagagacc

SEQ ID NO: 9775 - RNA, 22 nt, Artificial Sequence
  SAMD9 targeting guide sequence portion
uuucuuuugaauugcaaauaag

SEQ ID NO: 9776 - RNA, 22 nt, Artificial Sequence
  SAMD9 targeting guide sequence portion
uuugaauugcaaauaagaucca

SEQ ID NO: 9777 - RNA, 22 nt, Artificial Sequence
  SAMD9 targeting guide sequence portion
uuugaucaggucucuggaucuu

SEQ ID NO: 9778 - RNA, 22 nt, Artificial Sequence
  SAMD9 targeting guide sequence portion
uuuugaauugcaaauaagaucc

SEQ ID NO: 9779 - RNA, 20 nt, Artificial Sequence
  SAMD9 targeting guide sequence portion
aauuucaaauaagauccaga

SEQ ID NO: 9780 - RNA, 20 nt, Artificial Sequence
  SAMD9 targeting guide sequence portion
auuucaaauaagauccagag

SEQ ID NO: 9781 - RNA, 20 nt, Artificial Sequence
  SAMD9 targeting guide sequence portion
cucuggaucuuauuugaaau

SEQ ID NO: 9782 - RNA, 20 nt, Artificial Sequence
  SAMD9 targeting guide sequence portion
cuggaucuuauuugaaauuc

SEQ ID NO: 9783 - RNA, 20 nt, Artificial Sequence
  SAMD9 targeting guide sequence portion
cuuauuugaaauucaaaaga

SEQ ID NO: 9784 - RNA, 20 nt, Artificial Sequence
  SAMD9 targeting guide sequence portion
cuuuugaauuucaaauaaga

SEQ ID NO: 9785 - RNA, 20 nt, Artificial Sequence
  SAMD9 targeting guide sequence portion
gaauuucaaauaagauccag

SEQ ID NO: 9786 - RNA, 20 nt, Artificial Sequence
  SAMD9 targeting guide sequence portion
gaucuuauuugaaauucaaa

SEQ ID NO: 9787 - RNA, 20 nt, Artificial Sequence
  SAMD9 targeting guide sequence portion
ggaucuuauuugaaauucaa

SEQ ID NO: 9788 - RNA, 20 nt, Artificial Sequence
  SAMD9 targeting guide sequence portion
ggucucuggaucuuauuuga

SEQ ID NO: 9789 - RNA, 20 nt, Artificial Sequence
  SAMD9 targeting guide sequence portion
gucucuggaucuuauuugaa

SEQ ID NO: 9790 - RNA, 20 nt, Artificial Sequence
  SAMD9 targeting guide sequence portion
ucaaauaagauccagagacc

SEQ ID NO: 9791 - RNA, 20 nt, Artificial Sequence
  SAMD9 targeting guide sequence portion
ucucuggaucuuauuugaaa

SEQ ID NO: 9792 - RNA, 20 nt, Artificial Sequence
  SAMD9 targeting guide sequence portion
ucuggaucuuauuugaaauu

SEQ ID NO: 9793 - RNA, 20 nt, Artificial Sequence
  SAMD9 targeting guide sequence portion
ucuuauuugaaauucaaaag

SEQ ID NO: 9794 - RNA, 20 nt, Artificial Sequence
  SAMD9 targeting guide sequence portion
ucuuuugaauuucaaauaag

SEQ ID NO: 9795 - RNA, 20 nt, Artificial Sequence
  SAMD9 targeting guide sequence portion
ugaauuucaaauaagaucca

SEQ ID NO: 9796 - RNA, 20 nt, Artificial Sequence
  SAMD9 targeting guide sequence portion
uggaucuuauuugaaauuca

SEQ ID NO: 9797 - RNA, 20 nt, Artificial Sequence
  SAMD9 targeting guide sequence portion
uucaaauaagauccagagac

SEQ ID NO: 9798 - RNA, 20 nt, Artificial Sequence
  SAMD9 targeting guide sequence portion
uugaauuucaaauaagaucc

SEQ ID NO: 9799 - RNA, 20 nt, Artificial Sequence
  SAMD9 targeting guide sequence portion
uuucaaauaagauccagaga

SEQ ID NO: 9800 - RNA, 20 nt, Artificial Sequence
  SAMD9 targeting guide sequence portion
uuugaauuucaaauaagauc

SEQ ID NO: 9801 - RNA, 21 nt, Artificial Sequence
  SAMD9 targeting guide sequence portion
aauuucaaauaagauccagag

SEQ ID NO: 9802 - RNA, 21 nt, Artificial Sequence
  SAMD9 targeting guide sequence portion
aggucucuggaucuuauuuga

SEQ ID NO: 9803 - RNA, 21 nt, Artificial Sequence
  SAMD9 targeting guide sequence portion
auuucaaauaagauccagaga

SEQ ID NO: 9804 - RNA, 21 nt, Artificial Sequence
  SAMD9 targeting guide sequence portion
cucuggaucuuauuugaaauu

SEQ ID NO: 9805 - RNA, 21 nt, Artificial Sequence
  SAMD9 targeting guide sequence portion
cuggaucuuauuugaaauuca

SEQ ID NO: 9806 - RNA, 21 nt, Artificial Sequence
  SAMD9 targeting guide sequence portion
gaauuucaaauaagauccaga

SEQ ID NO: 9807 - RNA, 21 nt, Artificial Sequence
  SAMD9 targeting guide sequence portion
ggaucuuauuugaaauucaaa

SEQ ID NO: 9808 - RNA, 21 nt, Artificial Sequence
  SAMD9 targeting guide sequence portion
ggucucuggaucuuauuugaa

SEQ ID NO: 9809 - RNA, 21 nt, Artificial Sequence
  SAMD9 targeting guide sequence portion
gucucuggaucuuauuugaaa

SEQ ID NO: 9810 - RNA, 21 nt, Artificial Sequence
  SAMD9 targeting guide sequence portion
ucaaauaagauccagagaccu

SEQ ID NO: 9811 - RNA, 21 nt, Artificial Sequence
  SAMD9 targeting guide sequence portion
ucucuggaucuuauuugaaau

SEQ ID NO: 9812 - RNA, 21 nt, Artificial Sequence
  SAMD9 targeting guide sequence portion
ucuggaucuuauuugaaauuc

SEQ ID NO: 9813 - RNA, 21 nt, Artificial Sequence
  SAMD9 targeting guide sequence portion
ugaauuucaaauaagauccag

SEQ ID NO: 9814 - RNA, 21 nt, Artificial Sequence
  SAMD9 targeting guide sequence portion
uggaucuuauuugaaauucaa

SEQ ID NO: 9815 - RNA, 21 nt, Artificial Sequence
  SAMD9 targeting guide sequence portion
uucaaauaagauccagagacc

SEQ ID NO: 9816 - RNA, 21 nt, Artificial Sequence
  SAMD9 targeting guide sequence portion
uugaauuucaaauaagaucca

SEQ ID NO: 9817 - RNA, 21 nt, Artificial Sequence
  SAMD9 targeting guide sequence portion
uuucaaauaagauccagagac

SEQ ID NO: 9818 - RNA, 21 nt, Artificial Sequence
  SAMD9 targeting guide sequence portion
uuugaauuucaaauaagaucc

SEQ ID NO: 9819 - RNA, 22 nt, Artificial Sequence
  SAMD9 targeting guide sequence portion
aauuucaaauaagauccagaga

SEQ ID NO: 9820 - RNA, 22 nt, Artificial Sequence
  SAMD9 targeting guide sequence portion
aggucucuggaucuuauuugaa

SEQ ID NO: 9821 - RNA, 22 nt, Artificial Sequence
  SAMD9 targeting guide sequence portion
auuucaaauaagauccagagac

SEQ ID NO: 9822 - RNA, 22 nt, Artificial Sequence
  SAMD9 targeting guide sequence portion
caggucucuggaucuuauuuga

SEQ ID NO: 9823 - RNA, 22 nt, Artificial Sequence
  SAMD9 targeting guide sequence portion
cucuggaucuuauuugaaauuc

SEQ ID NO: 9824 - RNA, 22 nt, Artificial Sequence
  SAMD9 targeting guide sequence portion
cuggaucuuauuugaaauucaa

SEQ ID NO: 9825 - RNA, 22 nt, Artificial Sequence
  SAMD9 targeting guide sequence portion
cuuuugaauuucaaauaagauc

SEQ ID NO: 9826 - RNA, 22 nt, Artificial Sequence
  SAMD9 targeting guide sequence portion
gaauuucaaauaagauccagag

SEQ ID NO: 9827 - RNA, 22 nt, Artificial Sequence
  SAMD9 targeting guide sequence portion
gaucuuauuugaaauucaaaag

SEQ ID NO: 9828 - RNA, 22 nt, Artificial Sequence
  SAMD9 targeting guide sequence portion
ggaucuuauuugaaauucaaaa

SEQ ID NO: 9829 - RNA, 22 nt, Artificial Sequence
  SAMD9 targeting guide sequence portion
ggucucuggaucuuauuugaaa

SEQ ID NO: 9830 - RNA, 22 nt, Artificial Sequence
  SAMD9 targeting guide sequence portion
gucucuggaucuuauuugaaau

SEQ ID NO: 9831 - RNA, 22 nt, Artificial Sequence
  SAMD9 targeting guide sequence portion
ucaaauaagauccagagaccug

SEQ ID NO: 9832 - RNA, 22 nt, Artificial Sequence
  SAMD9 targeting guide sequence portion
ucucuggaucuuauuugaaauu

SEQ ID NO: 9833 - RNA, 22 nt, Artificial Sequence
  SAMD9 targeting guide sequence portion
ucuggaucuuauuugaaauuca

SEQ ID NO: 9834 - RNA, 22 nt, Artificial Sequence
  SAMD9 targeting guide sequence portion
ugaauuucaaauaagauccaga

SEQ ID NO: 9835 - RNA, 22 nt, Artificial Sequence
  SAMD9 targeting guide sequence portion
uggaucuuauuugaaauucaaa

SEQ ID NO: 9836 - RNA, 22 nt, Artificial Sequence
  SAMD9 targeting guide sequence portion
uucaaauaagauccagagaccu

SEQ ID NO: 9837 - RNA, 22 nt, Artificial Sequence
  SAMD9 targeting guide sequence portion
uugaauuucaaauaagauccag

SEQ ID NO: 9838 - RNA, 22 nt, Artificial Sequence
  SAMD9 targeting guide sequence portion
uuucaaauaagauccagagacc

SEQ ID NO: 9839 - RNA, 22 nt, Artificial Sequence
  SAMD9 targeting guide sequence portion
uuugaauuucaaauaagaucca

SEQ ID NO: 9840 - RNA, 22 nt, Artificial Sequence
  SAMD9 targeting guide sequence portion
uuuugaauuucaaauaagaucc

SEQ ID NO: 9841 - RNA, 20 nt, Artificial Sequence
  SAMD9 targeting guide sequence portion
aaaaaacauacagacacuca

SEQ ID NO: 9842 - RNA, 20 nt, Artificial Sequence
  SAMD9 targeting guide sequence portion
aaaaacauacagacacucaa

SEQ ID NO: 9843 - RNA, 20 nt, Artificial Sequence
  SAMD9 targeting guide sequence portion
aaaacauacagacacucaaa

SEQ ID NO: 9844 - RNA, 20 nt, Artificial Sequence
  SAMD9 targeting guide sequence portion
aaacauacagacacucaaau

SEQ ID NO: 9845 - RNA, 20 nt, Artificial Sequence
  SAMD9 targeting guide sequence portion
aacauacagacacucaaauu

SEQ ID NO: 9846 - RNA, 20 nt, Artificial Sequence
  SAMD9 targeting guide sequence portion
aauuugagugucuguauguu

SEQ ID NO: 9847 - RNA, 20 nt, Artificial Sequence
  SAMD9 targeting guide sequence portion
acauacagacacucaaauuc

SEQ ID NO: 9848 - RNA, 20 nt, Artificial Sequence
  SAMD9 targeting guide sequence portion
auuugagugucuguauguuu

SEQ ID NO: 9849 - RNA, 20 nt, Artificial Sequence
  SAMD9 targeting guide sequence portion
cauacagacacucaaauucc

SEQ ID NO: 9850 - RNA, 20 nt, Artificial Sequence
  SAMD9 targeting guide sequence portion
ccaaacaaacaauuaaaaaa

SEQ ID NO: 9851 - RNA, 20 nt, Artificial Sequence
  SAMD9 targeting guide sequence portion
cuuguggaauuugagugucu

SEQ ID NO: 9852 - RNA, 20 nt, Artificial Sequence
  SAMD9 targeting guide sequence portion
gaauuugagugucuguaugu

SEQ ID NO: 9853 - RNA, 20 nt, Artificial Sequence
  SAMD9 targeting guide sequence portion
gcuuguggaauuugaguguc

SEQ ID NO: 9854 - RNA, 20 nt, Artificial Sequence
  SAMD9 targeting guide sequence portion
ggaauuugagugucuguaug

SEQ ID NO: 9855 - RNA, 20 nt, Artificial Sequence
  SAMD9 targeting guide sequence portion
guggaauuugagugucugua

SEQ ID NO: 9856 - RNA, 20 nt, Artificial Sequence
  SAMD9 targeting guide sequence portion
uccaaacaaacaauuaaaaa

SEQ ID NO: 9857 - RNA, 20 nt, Artificial Sequence
  SAMD9 targeting guide sequence portion
ugagugucuguauguuuuuu

SEQ ID NO: 9858 - RNA, 20 nt, Artificial Sequence
  SAMD9 targeting guide sequence portion
uggaauuugagugucuguau

SEQ ID NO: 9859 - RNA, 20 nt, Artificial Sequence
  SAMD9 targeting guide sequence portion
uguggaauuugagugucugu

SEQ ID NO: 9860 - RNA, 20 nt, Artificial Sequence
  SAMD9 targeting guide sequence portion
uugagugucuguauguuuuu

SEQ ID NO: 9861 - RNA, 20 nt, Artificial Sequence
  SAMD9 targeting guide sequence portion
uuguggaauuugagugucug

SEQ ID NO: 9862 - RNA, 20 nt, Artificial Sequence
  SAMD9 targeting guide sequence portion
uuugagugucuguauguuuu

SEQ ID NO: 9863 - RNA, 21 nt, Artificial Sequence
  SAMD9 targeting guide sequence portion
aaaaaacauacagacacucaa

SEQ ID NO: 9864 - RNA, 21 nt, Artificial Sequence
  SAMD9 targeting guide sequence portion
aaaaacauacagacacucaaa

SEQ ID NO: 9865 - RNA, 21 nt, Artificial Sequence
  SAMD9 targeting guide sequence portion
aaaacauacagacacucaaau

SEQ ID NO: 9866 - RNA, 21 nt, Artificial Sequence
  SAMD9 targeting guide sequence portion
aaacauacagacacucaaauu

SEQ ID NO: 9867 - RNA, 21 nt, Artificial Sequence
  SAMD9 targeting guide sequence portion
aacauacagacacucaaauuc

SEQ ID NO: 9868 - RNA, 21 nt, Artificial Sequence
  SAMD9 targeting guide sequence portion
aauuugagugucuguauguuu

SEQ ID NO: 9869 - RNA, 21 nt, Artificial Sequence
  SAMD9 targeting guide sequence portion
acauacagacacucaaauucc

SEQ ID NO: 9870 - RNA, 21 nt, Artificial Sequence
  SAMD9 targeting guide sequence portion
agcuuguggaauuugaguguc

SEQ ID NO: 9871 - RNA, 21 nt, Artificial Sequence
  SAMD9 targeting guide sequence portion
auuugagugucuguauguuuu

SEQ ID NO: 9872 - RNA, 21 nt, Artificial Sequence
  SAMD9 targeting guide sequence portion
cauacagacacucaaauucca

SEQ ID NO: 9873 - RNA, 21 nt, Artificial Sequence
  SAMD9 targeting guide sequence portion
cuccaaacaaacaauuaaaaa

SEQ ID NO: 9874 - RNA, 21 nt, Artificial Sequence
  SAMD9 targeting guide sequence portion
cuuguggaauuugagugucug

SEQ ID NO: 9875 - RNA, 21 nt, Artificial Sequence
  SAMD9 targeting guide sequence portion
gaauuugagugucuguauguu

SEQ ID NO: 9876 - RNA, 21 nt, Artificial Sequence
  SAMD9 targeting guide sequence portion
gcuuguggaauuugagugucu

SEQ ID NO: 9877 - RNA, 21 nt, Artificial Sequence
  SAMD9 targeting guide sequence portion
ggaauuugagugucuguaugu

SEQ ID NO: 9878 - RNA, 21 nt, Artificial Sequence
  SAMD9 targeting guide sequence portion
guggaauuugagugucuguau

SEQ ID NO: 9879 - RNA, 21 nt, Artificial Sequence
  SAMD9 targeting guide sequence portion
uggaauuugagugucuguaug

SEQ ID NO: 9880 - RNA, 21 nt, Artificial Sequence
  SAMD9 targeting guide sequence portion
uguggaauuugagugucugua

SEQ ID NO: 9881 - RNA, 21 nt, Artificial Sequence
  SAMD9 targeting guide sequence portion
uugagugucuguauguuuuuu

SEQ ID NO: 9882 - RNA, 21 nt, Artificial Sequence
  SAMD9 targeting guide sequence portion
uuguggaauuugagugucugu

SEQ ID NO: 9883 - RNA, 21 nt, Artificial Sequence
  SAMD9 targeting guide sequence portion
uuugagugucuguauguuuuu

SEQ ID NO: 9884 - RNA, 22 nt, Artificial Sequence
  SAMD9 targeting guide sequence portion
aaaaaacauacagacacucaaa

SEQ ID NO: 9885 - RNA, 22 nt, Artificial Sequence
  SAMD9 targeting guide sequence portion
aaaaacauacagacacucaaau

SEQ ID NO: 9886 - RNA, 22 nt, Artificial Sequence
  SAMD9 targeting guide sequence portion
aaaacauacagacacucaaauu

SEQ ID NO: 9887 - RNA, 22 nt, Artificial Sequence
  SAMD9 targeting guide sequence portion
aaacauacagacacucaaauuc

SEQ ID NO: 9888 - RNA, 22 nt, Artificial Sequence
  SAMD9 targeting guide sequence portion
aacauacagacacucaaauucc

SEQ ID NO: 9889 - RNA, 22 nt, Artificial Sequence
  SAMD9 targeting guide sequence portion
aauuugagugucuguauguuuu

SEQ ID NO: 9890 - RNA, 22 nt, Artificial Sequence
  SAMD9 targeting guide sequence portion
acauacagacacucaaauucca

SEQ ID NO: 9891 - RNA, 22 nt, Artificial Sequence
  SAMD9 targeting guide sequence portion
agcuuguggaauuugagugucu

SEQ ID NO: 9892 - RNA, 22 nt, Artificial Sequence
  SAMD9 targeting guide sequence portion
auuugagugucuguauguuuuu

SEQ ID NO: 9893 - RNA, 22 nt, Artificial Sequence
  SAMD9 targeting guide sequence portion
cauacagacacucaaauuccac

SEQ ID NO: 9894 - RNA, 22 nt, Artificial Sequence
  SAMD9 targeting guide sequence portion
ccuccaaacaaacaauuaaaaa

SEQ ID NO: 9895 - RNA, 22 nt, Artificial Sequence
  SAMD9 targeting guide sequence portion
cuccaaacaaacaauuaaaaaa

SEQ ID NO: 9896 - RNA, 22 nt, Artificial Sequence
  SAMD9 targeting guide sequence portion
cuuguggaauuugagugucugu

SEQ ID NO: 9897 - RNA, 22 nt, Artificial Sequence
  SAMD9 targeting guide sequence portion
gaauuugagugucuguauguuu

SEQ ID NO: 9898 - RNA, 22 nt, Artificial Sequence
  SAMD9 targeting guide sequence portion
gcuuguggaauuugagugucug

SEQ ID NO: 9899 - RNA, 22 nt, Artificial Sequence
  SAMD9 targeting guide sequence portion
ggaauuugagugucuguauguu

SEQ ID NO: 9900 - RNA, 22 nt, Artificial Sequence
  SAMD9 targeting guide sequence portion
guggaauuugagugucuguaug

SEQ ID NO: 9901 - RNA, 22 nt, Artificial Sequence
  SAMD9 targeting guide sequence portion
uagcuuguggaauuugaguguc

SEQ ID NO: 9902 - RNA, 22 nt, Artificial Sequence
  SAMD9 targeting guide sequence portion
uggaauuugagugucuguaugu

SEQ ID NO: 9903 - RNA, 22 nt, Artificial Sequence
  SAMD9 targeting guide sequence portion
uguggaauuugagugucuguau

SEQ ID NO: 9904 - RNA, 22 nt, Artificial Sequence
  SAMD9 targeting guide sequence portion
uuguggaauuugagugucugua

SEQ ID NO: 9905 - RNA, 22 nt, Artificial Sequence
  SAMD9 targeting guide sequence portion
uuugagugucuguauguuuuuu

SEQ ID NO: 9906 - RNA, 20 nt, Artificial Sequence
  SAMD9 targeting guide sequence portion
cuccaaacaaacaauuaaaa

SEQ ID NO: 9907 - RNA, 21 nt, Artificial Sequence
  SAMD9 targeting guide sequence portion
ccuccaaacaaacaauuaaaa

SEQ ID NO: 9908 - RNA, 22 nt, Artificial Sequence
  SAMD9 targeting guide sequence portion
cccuccaaacaaacaauuaaaa

SEQ ID NO: 9909 - RNA, 20 nt, Artificial Sequence
  SAMD9 targeting guide sequence portion
acagaggacaguaauagaaa

SEQ ID NO: 9910 - RNA, 20 nt, Artificial Sequence
  SAMD9 targeting guide sequence portion
acuguccucuguggaugacc

SEQ ID NO: 9911 - RNA, 20 nt, Artificial Sequence
  SAMD9 targeting guide sequence portion
aggggaucucuugggucauc

SEQ ID NO: 9912 - RNA, 20 nt, Artificial Sequence
  SAMD9 targeting guide sequence portion
auccacagaggacaguaaua

SEQ ID NO: 9913 - RNA, 20 nt, Artificial Sequence
  SAMD9 targeting guide sequence portion
aucucuugggucauccacag

SEQ ID NO: 9914 - RNA, 20 nt, Artificial Sequence
  SAMD9 targeting guide sequence portion
auuacuguccucuguggaug

SEQ ID NO: 9915 - RNA, 20 nt, Artificial Sequence
  SAMD9 targeting guide sequence portion
cacagaggacaguaauagaa

SEQ ID NO: 9916 - RNA, 20 nt, Artificial Sequence
  SAMD9 targeting guide sequence portion
cagaggacaguaauagaaau

SEQ ID NO: 9917 - RNA, 20 nt, Artificial Sequence
  SAMD9 targeting guide sequence portion
cauccacagaggacaguaau

SEQ ID NO: 9918 - RNA, 20 nt, Artificial Sequence
  SAMD9 targeting guide sequence portion
ccacagaggacaguaauaga

SEQ ID NO: 9919 - RNA, 20 nt, Artificial Sequence
  SAMD9 targeting guide sequence portion
ccucuguggaugacccaaga

SEQ ID NO: 9920 - RNA, 20 nt, Artificial Sequence
  SAMD9 targeting guide sequence portion
cuauuacuguccucugugga

SEQ ID NO: 9921 - RNA, 20 nt, Artificial Sequence
  SAMD9 targeting guide sequence portion
cucuguggaugacccaagag

SEQ ID NO: 9922 - RNA, 20 nt, Artificial Sequence
  SAMD9 targeting guide sequence portion
cucuugggucauccacagag

SEQ ID NO: 9923 - RNA, 20 nt, Artificial Sequence
  SAMD9 targeting guide sequence portion
cuguccucuguggaugaccc

SEQ ID NO: 9924 - RNA, 20 nt, Artificial Sequence
  SAMD9 targeting guide sequence portion
cuguggaugacccaagagau

SEQ ID NO: 9925 - RNA, 20 nt, Artificial Sequence
  SAMD9 targeting guide sequence portion
cuugggucauccacagagga

SEQ ID NO: 9926 - RNA, 20 nt, Artificial Sequence
  SAMD9 targeting guide sequence portion
gaggggaucucuugggucau

SEQ ID NO: 9927 - RNA, 20 nt, Artificial Sequence
  SAMD9 targeting guide sequence portion
gaucucuugggucauccaca

SEQ ID NO: 9928 - RNA, 20 nt, Artificial Sequence
  SAMD9 targeting guide sequence portion
ggaucucuugggucauccac

SEQ ID NO: 9929 - RNA, 20 nt, Artificial Sequence
  SAMD9 targeting guide sequence portion
gggaucucuugggucaucca

SEQ ID NO: 9930 - RNA, 20 nt, Artificial Sequence
  SAMD9 targeting guide sequence portion
ggggaucucuugggucaucc

SEQ ID NO: 9931 - RNA, 20 nt, Artificial Sequence
  SAMD9 targeting guide sequence portion
gggucauccacagaggacag

SEQ ID NO: 9932 - RNA, 20 nt, Artificial Sequence
  SAMD9 targeting guide sequence portion
gguauuucuauuacuguccu

SEQ ID NO: 9933 - RNA, 20 nt, Artificial Sequence
  SAMD9 targeting guide sequence portion
ggucauccacagaggacagu

SEQ ID NO: 9934 - RNA, 20 nt, Artificial Sequence
  SAMD9 targeting guide sequence portion
ggugguauuucuauuacugu

SEQ ID NO: 9935 - RNA, 20 nt, Artificial Sequence
  SAMD9 targeting guide sequence portion
gucauccacagaggacagua

SEQ ID NO: 9936 - RNA, 20 nt, Artificial Sequence
  SAMD9 targeting guide sequence portion
guccucuguggaugacccaa

SEQ ID NO: 9937 - RNA, 20 nt, Artificial Sequence
  SAMD9 targeting guide sequence portion
guggaugacccaagagaucc

SEQ ID NO: 9938 - RNA, 20 nt, Artificial Sequence
  SAMD9 targeting guide sequence portion
gugguauuucuauuacuguc

SEQ ID NO: 9939 - RNA, 20 nt, Artificial Sequence
  SAMD9 targeting guide sequence portion
uacuguccucuguggaugac

SEQ ID NO: 9940 - RNA, 20 nt, Artificial Sequence
  SAMD9 targeting guide sequence portion
uauuacuguccucuguggau

SEQ ID NO: 9941 - RNA, 20 nt, Artificial Sequence
  SAMD9 targeting guide sequence portion
ucauccacagaggacaguaa

SEQ ID NO: 9942 - RNA, 20 nt, Artificial Sequence
  SAMD9 targeting guide sequence portion
uccacagaggacaguaauag

SEQ ID NO: 9943 - RNA, 20 nt, Artificial Sequence
  SAMD9 targeting guide sequence portion
uccucuguggaugacccaag

SEQ ID NO: 9944 - RNA, 20 nt, Artificial Sequence
  SAMD9 targeting guide sequence portion
ucucuugggucauccacaga

SEQ ID NO: 9945 - RNA, 20 nt, Artificial Sequence
  SAMD9 targeting guide sequence portion
ucuguggaugacccaagaga

SEQ ID NO: 9946 - RNA, 20 nt, Artificial Sequence
  SAMD9 targeting guide sequence portion
ucuugggucauccacagagg

SEQ ID NO: 9947 - RNA, 20 nt, Artificial Sequence
  SAMD9 targeting guide sequence portion
ugggucauccacagaggaca

SEQ ID NO: 9948 - RNA, 20 nt, Artificial Sequence
  SAMD9 targeting guide sequence portion
ugguauuucuauuacugucc

SEQ ID NO: 9949 - RNA, 20 nt, Artificial Sequence
  SAMD9 targeting guide sequence portion
uguccucuguggaugaccca

SEQ ID NO: 9950 - RNA, 20 nt, Artificial Sequence
  SAMD9 targeting guide sequence portion
uguggaugacccaagagauc

SEQ ID NO: 9951 - RNA, 20 nt, Artificial Sequence
  SAMD9 targeting guide sequence portion
uuacuguccucuguggauga

SEQ ID NO: 9952 - RNA, 20 nt, Artificial Sequence
  SAMD9 targeting guide sequence portion
uugggucauccacagaggac

SEQ ID NO: 9953 - RNA, 21 nt, Artificial Sequence
  SAMD9 targeting guide sequence portion
acagaggacaguaauagaaau

SEQ ID NO: 9954 - RNA, 21 nt, Artificial Sequence
  SAMD9 targeting guide sequence portion
acuguccucuguggaugaccc

SEQ ID NO: 9955 - RNA, 21 nt, Artificial Sequence
  SAMD9 targeting guide sequence portion
aggggaucucuugggucaucc

SEQ ID NO: 9956 - RNA, 21 nt, Artificial Sequence
  SAMD9 targeting guide sequence portion
auccacagaggacaguaauag

SEQ ID NO: 9957 - RNA, 21 nt, Artificial Sequence
  SAMD9 targeting guide sequence portion
aucucuugggucauccacaga

SEQ ID NO: 9958 - RNA, 21 nt, Artificial Sequence
  SAMD9 targeting guide sequence portion
auuacuguccucuguggauga

SEQ ID NO: 9959 - RNA, 21 nt, Artificial Sequence
  SAMD9 targeting guide sequence portion
cacagaggacaguaauagaaa

SEQ ID NO: 9960 - RNA, 21 nt, Artificial Sequence
  SAMD9 targeting guide sequence portion
cagaggacaguaauagaaaua

SEQ ID NO: 9961 - RNA, 21 nt, Artificial Sequence
  SAMD9 targeting guide sequence portion
cauccacagaggacaguaaua

SEQ ID NO: 9962 - RNA, 21 nt, Artificial Sequence
  SAMD9 targeting guide sequence portion
ccacagaggacaguaauagaa

SEQ ID NO: 9963 - RNA, 21 nt, Artificial Sequence
  SAMD9 targeting guide sequence portion
ccucuguggaugacccaagag

SEQ ID NO: 9964 - RNA, 21 nt, Artificial Sequence
  SAMD9 targeting guide sequence portion
cuauuacuguccucuguggau

SEQ ID NO: 9965 - RNA, 21 nt, Artificial Sequence
  SAMD9 targeting guide sequence portion
cucuguggaugacccaagaga

SEQ ID NO: 9966 - RNA, 21 nt, Artificial Sequence
  SAMD9 targeting guide sequence portion
cucuugggucauccacagagg

SEQ ID NO: 9967 - RNA, 21 nt, Artificial Sequence
  SAMD9 targeting guide sequence portion
cuguccucuguggaugaccca

SEQ ID NO: 9968 - RNA, 21 nt, Artificial Sequence
  SAMD9 targeting guide sequence portion
cuguggaugacccaagagauc

SEQ ID NO: 9969 - RNA, 21 nt, Artificial Sequence
  SAMD9 targeting guide sequence portion
cuugggucauccacagaggac

SEQ ID NO: 9970 - RNA, 21 nt, Artificial Sequence
  SAMD9 targeting guide sequence portion
gaggggaucucuugggucauc

SEQ ID NO: 9971 - RNA, 21 nt, Artificial Sequence
  SAMD9 targeting guide sequence portion
gaucucuugggucauccacag

SEQ ID NO: 9972 - RNA, 21 nt, Artificial Sequence
  SAMD9 targeting guide sequence portion
ggaucucuugggucauccaca

SEQ ID NO: 9973 - RNA, 21 nt, Artificial Sequence
  SAMD9 targeting guide sequence portion
gggaucucuugggucauccac

SEQ ID NO: 9974 - RNA, 21 nt, Artificial Sequence
  SAMD9 targeting guide sequence portion
ggggaucucuugggucaucca

SEQ ID NO: 9975 - RNA, 21 nt, Artificial Sequence
  SAMD9 targeting guide sequence portion
gggucauccacagaggacagu

SEQ ID NO: 9976 - RNA, 21 nt, Artificial Sequence
  SAMD9 targeting guide sequence portion
ggucauccacagaggacagua

SEQ ID NO: 9977 - RNA, 21 nt, Artificial Sequence
  SAMD9 targeting guide sequence portion
ggugguauuucuauuacuguc

SEQ ID NO: 9978 - RNA, 21 nt, Artificial Sequence
  SAMD9 targeting guide sequence portion
gucauccacagaggacaguaa

SEQ ID NO: 9979 - RNA, 21 nt, Artificial Sequence
  SAMD9 targeting guide sequence portion
guccucuguggaugacccaag

SEQ ID NO: 9980 - RNA, 21 nt, Artificial Sequence
  SAMD9 targeting guide sequence portion
guggaugacccaagagauccc

SEQ ID NO: 9981 - RNA, 21 nt, Artificial Sequence
  SAMD9 targeting guide sequence portion
gugguauuucuauuacugucc

SEQ ID NO: 9982 - RNA, 21 nt, Artificial Sequence
  SAMD9 targeting guide sequence portion
uacuguccucuguggaugacc

SEQ ID NO: 9983 - RNA, 21 nt, Artificial Sequence
  SAMD9 targeting guide sequence portion
uauuacuguccucuguggaug

SEQ ID NO: 9984 - RNA, 21 nt, Artificial Sequence
  SAMD9 targeting guide sequence portion
ucauccacagaggacaguaau

SEQ ID NO: 9985 - RNA, 21 nt, Artificial Sequence
  SAMD9 targeting guide sequence portion
uccacagaggacaguaauaga

SEQ ID NO: 9986 - RNA, 21 nt, Artificial Sequence
  SAMD9 targeting guide sequence portion
uccucuguggaugacccaaga

SEQ ID NO: 9987 - RNA, 21 nt, Artificial Sequence
  SAMD9 targeting guide sequence portion
ucuauuacuguccucugugga

SEQ ID NO: 9988 - RNA, 21 nt, Artificial Sequence
  SAMD9 targeting guide sequence portion
ucucuugggucauccacagag

SEQ ID NO: 9989 - RNA, 21 nt, Artificial Sequence
  SAMD9 targeting guide sequence portion
ucuguggaugacccaagagau

SEQ ID NO: 9990 - RNA, 21 nt, Artificial Sequence
  SAMD9 targeting guide sequence portion
ucuugggucauccacagagga

SEQ ID NO: 9991 - RNA, 21 nt, Artificial Sequence
  SAMD9 targeting guide sequence portion
ugaggggaucucuugggucau

SEQ ID NO: 9992 - RNA, 21 nt, Artificial Sequence
  SAMD9 targeting guide sequence portion
ugggucauccacagaggacag

SEQ ID NO: 9993 - RNA, 21 nt, Artificial Sequence
  SAMD9 targeting guide sequence portion
ugguauuucuauuacuguccu

SEQ ID NO: 9994 - RNA, 21 nt, Artificial Sequence
  SAMD9 targeting guide sequence portion
uggugguauuucuauuacugu

SEQ ID NO: 9995 - RNA, 21 nt, Artificial Sequence
  SAMD9 targeting guide sequence portion
uguccucuguggaugacccaa

SEQ ID NO: 9996 - RNA, 21 nt, Artificial Sequence
  SAMD9 targeting guide sequence portion
uguggaugacccaagagaucc

SEQ ID NO: 9997 - RNA, 21 nt, Artificial Sequence
  SAMD9 targeting guide sequence portion
uuacuguccucuguggaugac

SEQ ID NO: 9998 - RNA, 21 nt, Artificial Sequence
  SAMD9 targeting guide sequence portion
uugggucauccacagaggaca

SEQ ID NO: 9999 - RNA, 22 nt, Artificial Sequence
  SAMD9 targeting guide sequence portion
acagaggacaguaauagaaaua

SEQ ID NO: 10000 - RNA, 22 nt, Artificial Sequence
  SAMD9 targeting guide sequence portion
acuguccucuguggaugaccca

SEQ ID NO: 10001 - RNA, 22 nt, Artificial Sequence
  SAMD9 targeting guide sequence portion
aggggaucucuugggucaucca

SEQ ID NO: 10002 - RNA, 22 nt, Artificial Sequence
  SAMD9 targeting guide sequence portion
auccacagaggacaguaauaga

SEQ ID NO: 10003 - RNA, 22 nt, Artificial Sequence
  SAMD9 targeting guide sequence portion
aucucuugggucauccacagag

SEQ ID NO: 10004 - RNA, 22 nt, Artificial Sequence
  SAMD9 targeting guide sequence portion
augaggggaucucuugggucau

SEQ ID NO: 10005 - RNA, 22 nt, Artificial Sequence
  SAMD9 targeting guide sequence portion
auuacuguccucuguggaugac

SEQ ID NO: 10006 - RNA, 22 nt, Artificial Sequence
  SAMD9 targeting guide sequence portion
cacagaggacaguaauagaaau

SEQ ID NO: 10007 - RNA, 22 nt, Artificial Sequence
  SAMD9 targeting guide sequence portion
cagaggacaguaauagaaauac

SEQ ID NO: 10008 - RNA, 22 nt, Artificial Sequence
  SAMD9 targeting guide sequence portion
cauccacagaggacaguaauag

SEQ ID NO: 10009 - RNA, 22 nt, Artificial Sequence
  SAMD9 targeting guide sequence portion
ccacagaggacaguaauagaaa

SEQ ID NO: 10010 - RNA, 22 nt, Artificial Sequence
  SAMD9 targeting guide sequence portion
ccucuguggaugacccaagaga

SEQ ID NO: 10011 - RNA, 22 nt, Artificial Sequence
  SAMD9 targeting guide sequence portion
cuauuacuguccucuguggaug

SEQ ID NO: 10012 - RNA, 22 nt, Artificial Sequence
  SAMD9 targeting guide sequence portion
cucuguggaugacccaagagau

SEQ ID NO: 10013 - RNA, 22 nt, Artificial Sequence
  SAMD9 targeting guide sequence portion
cucuugggucauccacagagga

SEQ ID NO: 10014 - RNA, 22 nt, Artificial Sequence
  SAMD9 targeting guide sequence portion
cuguccucuguggaugacccaa

SEQ ID NO: 10015 - RNA, 22 nt, Artificial Sequence
  SAMD9 targeting guide sequence portion
cuguggaugacccaagagaucc

SEQ ID NO: 10016 - RNA, 22 nt, Artificial Sequence
  SAMD9 targeting guide sequence portion
cuugggucauccacagaggaca

SEQ ID NO: 10017 - RNA, 22 nt, Artificial Sequence
  SAMD9 targeting guide sequence portion
gaggggaucucuugggucaucc

SEQ ID NO: 10018 - RNA, 22 nt, Artificial Sequence
  SAMD9 targeting guide sequence portion
gaucucuugggucauccacaga

SEQ ID NO: 10019 - RNA, 22 nt, Artificial Sequence
  SAMD9 targeting guide sequence portion
ggaucucuugggucauccacag

SEQ ID NO: 10020 - RNA, 22 nt, Artificial Sequence
  SAMD9 targeting guide sequence portion
gggaucucuugggucauccaca

SEQ ID NO: 10021 - RNA, 22 nt, Artificial Sequence
  SAMD9 targeting guide sequence portion
ggggaucucuugggucauccac

SEQ ID NO: 10022 - RNA, 22 nt, Artificial Sequence
  SAMD9 targeting guide sequence portion
gggucauccacagaggacagua

SEQ ID NO: 10023 - RNA, 22 nt, Artificial Sequence
  SAMD9 targeting guide sequence portion
ggucauccacagaggacaguaa

SEQ ID NO: 10024 - RNA, 22 nt, Artificial Sequence
  SAMD9 targeting guide sequence portion
ggugguauuucuauuacugucc

SEQ ID NO: 10025 - RNA, 22 nt, Artificial Sequence
  SAMD9 targeting guide sequence portion
gucauccacagaggacaguaau

SEQ ID NO: 10026 - RNA, 22 nt, Artificial Sequence
  SAMD9 targeting guide sequence portion
guccucuguggaugacccaaga

SEQ ID NO: 10027 - RNA, 22 nt, Artificial Sequence
  SAMD9 targeting guide sequence portion
guggaugacccaagagaucccc

SEQ ID NO: 10028 - RNA, 22 nt, Artificial Sequence
  SAMD9 targeting guide sequence portion
gugguauuucuauuacuguccu

SEQ ID NO: 10029 - RNA, 22 nt, Artificial Sequence
  SAMD9 targeting guide sequence portion
uacuguccucuguggaugaccc

SEQ ID NO: 10030 - RNA, 22 nt, Artificial Sequence
  SAMD9 targeting guide sequence portion
uauuacuguccucuguggauga

SEQ ID NO: 10031 - RNA, 22 nt, Artificial Sequence
  SAMD9 targeting guide sequence portion
ucauccacagaggacaguaaua

SEQ ID NO: 10032 - RNA, 22 nt, Artificial Sequence
  SAMD9 targeting guide sequence portion
uccacagaggacaguaauagaa

SEQ ID NO: 10033 - RNA, 22 nt, Artificial Sequence
  SAMD9 targeting guide sequence portion
uccucuguggaugacccaagag

SEQ ID NO: 10034 - RNA, 22 nt, Artificial Sequence
  SAMD9 targeting guide sequence portion
ucuauuacuguccucuguggau

SEQ ID NO: 10035 - RNA, 22 nt, Artificial Sequence
  SAMD9 targeting guide sequence portion
ucucuugggucauccacagagg

SEQ ID NO: 10036 - RNA, 22 nt, Artificial Sequence
  SAMD9 targeting guide sequence portion
ucuguggaugacccaagagauc

SEQ ID NO: 10037 - RNA, 22 nt, Artificial Sequence
  SAMD9 targeting guide sequence portion
ucuugggucauccacagaggac

SEQ ID NO: 10038 - RNA, 22 nt, Artificial Sequence
  SAMD9 targeting guide sequence portion
ugaggggaucucuugggucauc

SEQ ID NO: 10039 - RNA, 22 nt, Artificial Sequence
  SAMD9 targeting guide sequence portion
ugggucauccacagaggacagu

SEQ ID NO: 10040 - RNA, 22 nt, Artificial Sequence
  SAMD9 targeting guide sequence portion
uggugguauuucuauuacuguc

SEQ ID NO: 10041 - RNA, 22 nt, Artificial Sequence
  SAMD9 targeting guide sequence portion
uguccucuguggaugacccaag

SEQ ID NO: 10042 - RNA, 22 nt, Artificial Sequence
  SAMD9 targeting guide sequence portion
uguggaugacccaagagauccc

SEQ ID NO: 10043 - RNA, 22 nt, Artificial Sequence
  SAMD9 targeting guide sequence portion
uuacuguccucuguggaugacc

SEQ ID NO: 10044 - RNA, 22 nt, Artificial Sequence
  SAMD9 targeting guide sequence portion
uucuauuacuguccucugugga

SEQ ID NO: 10045 - RNA, 22 nt, Artificial Sequence
  SAMD9 targeting guide sequence portion
uugggucauccacagaggacag

SEQ ID NO: 10046 - RNA, 22 nt, Artificial Sequence
  SAMD9 targeting guide sequence portion
uuggugguauuucuauuacugu

SEQ ID NO: 10047 - RNA, 20 nt, Artificial Sequence
  SAMD9 targeting guide sequence portion
aaagaggacaguaauagaaa

SEQ ID NO: 10048 - RNA, 20 nt, Artificial Sequence
  SAMD9 targeting guide sequence portion
aagaggacaguaauagaaau

SEQ ID NO: 10049 - RNA, 20 nt, Artificial Sequence
  SAMD9 targeting guide sequence portion
acuguccucuuuggaugacc

SEQ ID NO: 10050 - RNA, 20 nt, Artificial Sequence
  SAMD9 targeting guide sequence portion
auccaaagaggacaguaaua

SEQ ID NO: 10051 - RNA, 20 nt, Artificial Sequence
  SAMD9 targeting guide sequence portion
aucucuugggucauccaaag

SEQ ID NO: 10052 - RNA, 20 nt, Artificial Sequence
  SAMD9 targeting guide sequence portion
auuacuguccucuuuggaug

SEQ ID NO: 10053 - RNA, 20 nt, Artificial Sequence
  SAMD9 targeting guide sequence portion
auuucuauuacuguccucuu

SEQ ID NO: 10054 - RNA, 20 nt, Artificial Sequence
  SAMD9 targeting guide sequence portion
caaagaggacaguaauagaa

SEQ ID NO: 10055 - RNA, 20 nt, Artificial Sequence
  SAMD9 targeting guide sequence portion
cauccaaagaggacaguaau

SEQ ID NO: 10056 - RNA, 20 nt, Artificial Sequence
  SAMD9 targeting guide sequence portion
ccaaagaggacaguaauaga

SEQ ID NO: 10057 - RNA, 20 nt, Artificial Sequence
  SAMD9 targeting guide sequence portion
ccucuuuggaugacccaaga

SEQ ID NO: 10058 - RNA, 20 nt, Artificial Sequence
  SAMD9 targeting guide sequence portion
cuauuacuguccucuuugga

SEQ ID NO: 10059 - RNA, 20 nt, Artificial Sequence
  SAMD9 targeting guide sequence portion
cucuugggucauccaaagag

SEQ ID NO: 10060 - RNA, 20 nt, Artificial Sequence
  SAMD9 targeting guide sequence portion
cucuuuggaugacccaagag

SEQ ID NO: 10061 - RNA, 20 nt, Artificial Sequence
  SAMD9 targeting guide sequence portion
cuguccucuuuggaugaccc

SEQ ID NO: 10062 - RNA, 20 nt, Artificial Sequence
  SAMD9 targeting guide sequence portion
cuugggucauccaaagagga

SEQ ID NO: 10063 - RNA, 20 nt, Artificial Sequence
  SAMD9 targeting guide sequence portion
cuuuggaugacccaagagau

SEQ ID NO: 10064 - RNA, 20 nt, Artificial Sequence
  SAMD9 targeting guide sequence portion
gaucucuugggucauccaaa

SEQ ID NO: 10065 - RNA, 20 nt, Artificial Sequence
  SAMD9 targeting guide sequence portion
ggaucucuugggucauccaa

SEQ ID NO: 10066 - RNA, 20 nt, Artificial Sequence
  SAMD9 targeting guide sequence portion
gggucauccaaagaggacag

SEQ ID NO: 10067 - RNA, 20 nt, Artificial Sequence
  SAMD9 targeting guide sequence portion
ggucauccaaagaggacagu

SEQ ID NO: 10068 - RNA, 20 nt, Artificial Sequence
  SAMD9 targeting guide sequence portion
gucauccaaagaggacagua

SEQ ID NO: 10069 - RNA, 20 nt, Artificial Sequence
  SAMD9 targeting guide sequence portion
guccucuuuggaugacccaa

SEQ ID NO: 10070 - RNA, 20 nt, Artificial Sequence
  SAMD9 targeting guide sequence portion
uacuguccucuuuggaugac

SEQ ID NO: 10071 - RNA, 20 nt, Artificial Sequence
  SAMD9 targeting guide sequence portion
uauuacuguccucuuuggau

SEQ ID NO: 10072 - RNA, 20 nt, Artificial Sequence
  SAMD9 targeting guide sequence portion
ucauccaaagaggacaguaa

SEQ ID NO: 10073 - RNA, 20 nt, Artificial Sequence
  SAMD9 targeting guide sequence portion
uccaaagaggacaguaauag

SEQ ID NO: 10074 - RNA, 20 nt, Artificial Sequence
  SAMD9 targeting guide sequence portion
uccucuuuggaugacccaag

SEQ ID NO: 10075 - RNA, 20 nt, Artificial Sequence
  SAMD9 targeting guide sequence portion
ucuauuacuguccucuuugg

SEQ ID NO: 10076 - RNA, 20 nt, Artificial Sequence
  SAMD9 targeting guide sequence portion
ucucuugggucauccaaaga

SEQ ID NO: 10077 - RNA, 20 nt, Artificial Sequence
  SAMD9 targeting guide sequence portion
ucuugggucauccaaagagg

SEQ ID NO: 10078 - RNA, 20 nt, Artificial Sequence
  SAMD9 targeting guide sequence portion
ucuuuggaugacccaagaga

SEQ ID NO: 10079 - RNA, 20 nt, Artificial Sequence
  SAMD9 targeting guide sequence portion
ugggucauccaaagaggaca

SEQ ID NO: 10080 - RNA, 20 nt, Artificial Sequence
  SAMD9 targeting guide sequence portion
uguccucuuuggaugaccca

SEQ ID NO: 10081 - RNA, 20 nt, Artificial Sequence
  SAMD9 targeting guide sequence portion
uuacuguccucuuuggauga

SEQ ID NO: 10082 - RNA, 20 nt, Artificial Sequence
  SAMD9 targeting guide sequence portion
uucuauuacuguccucuuug

SEQ ID NO: 10083 - RNA, 20 nt, Artificial Sequence
  SAMD9 targeting guide sequence portion
uuggaugacccaagagaucc

SEQ ID NO: 10084 - RNA, 20 nt, Artificial Sequence
  SAMD9 targeting guide sequence portion
uugggucauccaaagaggac

SEQ ID NO: 10085 - RNA, 20 nt, Artificial Sequence
  SAMD9 targeting guide sequence portion
uuucuauuacuguccucuuu

SEQ ID NO: 10086 - RNA, 20 nt, Artificial Sequence
  SAMD9 targeting guide sequence portion
uuuggaugacccaagagauc

SEQ ID NO: 10087 - RNA, 21 nt, Artificial Sequence
  SAMD9 targeting guide sequence portion
aaagaggacaguaauagaaau

SEQ ID NO: 10088 - RNA, 21 nt, Artificial Sequence
  SAMD9 targeting guide sequence portion
aagaggacaguaauagaaaua

SEQ ID NO: 10089 - RNA, 21 nt, Artificial Sequence
  SAMD9 targeting guide sequence portion
acuguccucuuuggaugaccc

SEQ ID NO: 10090 - RNA, 21 nt, Artificial Sequence
  SAMD9 targeting guide sequence portion
auccaaagaggacaguaauag

SEQ ID NO: 10091 - RNA, 21 nt, Artificial Sequence
  SAMD9 targeting guide sequence portion
aucucuugggucauccaaaga

SEQ ID NO: 10092 - RNA, 21 nt, Artificial Sequence
  SAMD9 targeting guide sequence portion
auuacuguccucuuuggauga

SEQ ID NO: 10093 - RNA, 21 nt, Artificial Sequence
  SAMD9 targeting guide sequence portion
auuucuauuacuguccucuuu

SEQ ID NO: 10094 - RNA, 21 nt, Artificial Sequence
  SAMD9 targeting guide sequence portion
caaagaggacaguaauagaaa

SEQ ID NO: 10095 - RNA, 21 nt, Artificial Sequence
  SAMD9 targeting guide sequence portion
cauccaaagaggacaguaaua

SEQ ID NO: 10096 - RNA, 21 nt, Artificial Sequence
  SAMD9 targeting guide sequence portion
ccaaagaggacaguaauagaa

SEQ ID NO: 10097 - RNA, 21 nt, Artificial Sequence
  SAMD9 targeting guide sequence portion
ccucuuuggaugacccaagag

SEQ ID NO: 10098 - RNA, 21 nt, Artificial Sequence
  SAMD9 targeting guide sequence portion
cuauuacuguccucuuuggau

SEQ ID NO: 10099 - RNA, 21 nt, Artificial Sequence
  SAMD9 targeting guide sequence portion
cucuugggucauccaaagagg

SEQ ID NO: 10100 - RNA, 21 nt, Artificial Sequence
  SAMD9 targeting guide sequence portion
cucuuuggaugacccaagaga

SEQ ID NO: 10101 - RNA, 21 nt, Artificial Sequence
  SAMD9 targeting guide sequence portion
cuguccucuuuggaugaccca

SEQ ID NO: 10102 - RNA, 21 nt, Artificial Sequence
  SAMD9 targeting guide sequence portion
cuugggucauccaaagaggac

SEQ ID NO: 10103 - RNA, 21 nt, Artificial Sequence
  SAMD9 targeting guide sequence portion
cuuuggaugacccaagagauc

SEQ ID NO: 10104 - RNA, 21 nt, Artificial Sequence
  SAMD9 targeting guide sequence portion
gaucucuugggucauccaaag

SEQ ID NO: 10105 - RNA, 21 nt, Artificial Sequence
  SAMD9 targeting guide sequence portion
ggaucucuugggucauccaaa

SEQ ID NO: 10106 - RNA, 21 nt, Artificial Sequence
  SAMD9 targeting guide sequence portion
gggaucucuugggucauccaa

SEQ ID NO: 10107 - RNA, 21 nt, Artificial Sequence
  SAMD9 targeting guide sequence portion
gggucauccaaagaggacagu

SEQ ID NO: 10108 - RNA, 21 nt, Artificial Sequence
  SAMD9 targeting guide sequence portion
ggucauccaaagaggacagua

SEQ ID NO: 10109 - RNA, 21 nt, Artificial Sequence
  SAMD9 targeting guide sequence portion
gucauccaaagaggacaguaa

SEQ ID NO: 10110 - RNA, 21 nt, Artificial Sequence
  SAMD9 targeting guide sequence portion
guccucuuuggaugacccaag

SEQ ID NO: 10111 - RNA, 21 nt, Artificial Sequence
  SAMD9 targeting guide sequence portion
uacuguccucuuuggaugacc

SEQ ID NO: 10112 - RNA, 21 nt, Artificial Sequence
  SAMD9 targeting guide sequence portion
uauuacuguccucuuuggaug

SEQ ID NO: 10113 - RNA, 21 nt, Artificial Sequence
  SAMD9 targeting guide sequence portion
uauuucuauuacuguccucuu

SEQ ID NO: 10114 - RNA, 21 nt, Artificial Sequence
  SAMD9 targeting guide sequence portion
ucauccaaagaggacaguaau

SEQ ID NO: 10115 - RNA, 21 nt, Artificial Sequence
  SAMD9 targeting guide sequence portion
uccaaagaggacaguaauaga

SEQ ID NO: 10116 - RNA, 21 nt, Artificial Sequence
  SAMD9 targeting guide sequence portion
uccucuuuggaugacccaaga

SEQ ID NO: 10117 - RNA, 21 nt, Artificial Sequence
  SAMD9 targeting guide sequence portion
ucuauuacuguccucuuugga

SEQ ID NO: 10118 - RNA, 21 nt, Artificial Sequence
  SAMD9 targeting guide sequence portion
ucucuugggucauccaaagag

SEQ ID NO: 10119 - RNA, 21 nt, Artificial Sequence
  SAMD9 targeting guide sequence portion
ucuugggucauccaaagagga

SEQ ID NO: 10120 - RNA, 21 nt, Artificial Sequence
  SAMD9 targeting guide sequence portion
ucuuuggaugacccaagagau

SEQ ID NO: 10121 - RNA, 21 nt, Artificial Sequence
  SAMD9 targeting guide sequence portion
ugggucauccaaagaggacag

SEQ ID NO: 10122 - RNA, 21 nt, Artificial Sequence
  SAMD9 targeting guide sequence portion
uguccucuuuggaugacccaa

SEQ ID NO: 10123 - RNA, 21 nt, Artificial Sequence
  SAMD9 targeting guide sequence portion
uuacuguccucuuuggaugac

SEQ ID NO: 10124 - RNA, 21 nt, Artificial Sequence
  SAMD9 targeting guide sequence portion
uucuauuacuguccucuuugg

SEQ ID NO: 10125 - RNA, 21 nt, Artificial Sequence
  SAMD9 targeting guide sequence portion
uuggaugacccaagagauccc

SEQ ID NO: 10126 - RNA, 21 nt, Artificial Sequence
  SAMD9 targeting guide sequence portion
uugggucauccaaagaggaca

SEQ ID NO: 10127 - RNA, 21 nt, Artificial Sequence
  SAMD9 targeting guide sequence portion
uuucuauuacuguccucuuug

SEQ ID NO: 10128 - RNA, 21 nt, Artificial Sequence
  SAMD9 targeting guide sequence portion
uuuggaugacccaagagaucc

SEQ ID NO: 10129 - RNA, 22 nt, Artificial Sequence
  SAMD9 targeting guide sequence portion
aaagaggacaguaauagaaaua

SEQ ID NO: 10130 - RNA, 22 nt, Artificial Sequence
  SAMD9 targeting guide sequence portion
aagaggacaguaauagaaauac

SEQ ID NO: 10131 - RNA, 22 nt, Artificial Sequence
  SAMD9 targeting guide sequence portion
acuguccucuuuggaugaccca

SEQ ID NO: 10132 - RNA, 22 nt, Artificial Sequence
  SAMD9 targeting guide sequence portion
auccaaagaggacaguaauaga

SEQ ID NO: 10133 - RNA, 22 nt, Artificial Sequence
  SAMD9 targeting guide sequence portion
aucucuugggucauccaaagag

SEQ ID NO: 10134 - RNA, 22 nt, Artificial Sequence
  SAMD9 targeting guide sequence portion
auuacuguccucuuuggaugac

SEQ ID NO: 10135 - RNA, 22 nt, Artificial Sequence
  SAMD9 targeting guide sequence portion
auuucuauuacuguccucuuug

SEQ ID NO: 10136 - RNA, 22 nt, Artificial Sequence
  SAMD9 targeting guide sequence portion
caaagaggacaguaauagaaau

SEQ ID NO: 10137 - RNA, 22 nt, Artificial Sequence
  SAMD9 targeting guide sequence portion
cauccaaagaggacaguaauag

SEQ ID NO: 10138 - RNA, 22 nt, Artificial Sequence
  SAMD9 targeting guide sequence portion
ccaaagaggacaguaauagaaa

SEQ ID NO: 10139 - RNA, 22 nt, Artificial Sequence
  SAMD9 targeting guide sequence portion
ccucuuuggaugacccaagaga

SEQ ID NO: 10140 - RNA, 22 nt, Artificial Sequence
  SAMD9 targeting guide sequence portion
cuauuacuguccucuuuggaug

SEQ ID NO: 10141 - RNA, 22 nt, Artificial Sequence
  SAMD9 targeting guide sequence portion
cucuugggucauccaaagagga

SEQ ID NO: 10142 - RNA, 22 nt, Artificial Sequence
  SAMD9 targeting guide sequence portion
cucuuuggaugacccaagagau

SEQ ID NO: 10143 - RNA, 22 nt, Artificial Sequence
  SAMD9 targeting guide sequence portion
cuguccucuuuggaugacccaa

SEQ ID NO: 10144 - RNA, 22 nt, Artificial Sequence
  SAMD9 targeting guide sequence portion
cuugggucauccaaagaggaca

SEQ ID NO: 10145 - RNA, 22 nt, Artificial Sequence
  SAMD9 targeting guide sequence portion
cuuuggaugacccaagagaucc

SEQ ID NO: 10146 - RNA, 22 nt, Artificial Sequence
  SAMD9 targeting guide sequence portion
gaucucuugggucauccaaaga

SEQ ID NO: 10147 - RNA, 22 nt, Artificial Sequence
  SAMD9 targeting guide sequence portion
ggaucucuugggucauccaaag

SEQ ID NO: 10148 - RNA, 22 nt, Artificial Sequence
  SAMD9 targeting guide sequence portion
gggaucucuugggucauccaaa

SEQ ID NO: 10149 - RNA, 22 nt, Artificial Sequence
  SAMD9 targeting guide sequence portion
ggggaucucuugggucauccaa

SEQ ID NO: 10150 - RNA, 22 nt, Artificial Sequence
  SAMD9 targeting guide sequence portion
gggucauccaaagaggacagua

SEQ ID NO: 10151 - RNA, 22 nt, Artificial Sequence
  SAMD9 targeting guide sequence portion
ggucauccaaagaggacaguaa

SEQ ID NO: 10152 - RNA, 22 nt, Artificial Sequence
  SAMD9 targeting guide sequence portion
guauuucuauuacuguccucuu

SEQ ID NO: 10153 - RNA, 22 nt, Artificial Sequence
  SAMD9 targeting guide sequence portion
gucauccaaagaggacaguaau

SEQ ID NO: 10154 - RNA, 22 nt, Artificial Sequence
  SAMD9 targeting guide sequence portion
guccucuuuggaugacccaaga

SEQ ID NO: 10155 - RNA, 22 nt, Artificial Sequence
  SAMD9 targeting guide sequence portion
uacuguccucuuuggaugaccc

SEQ ID NO: 10156 - RNA, 22 nt, Artificial Sequence
  SAMD9 targeting guide sequence portion
uauuacuguccucuuuggauga

SEQ ID NO: 10157 - RNA, 22 nt, Artificial Sequence
  SAMD9 targeting guide sequence portion
uauuucuauuacuguccucuuu

SEQ ID NO: 10158 - RNA, 22 nt, Artificial Sequence
  SAMD9 targeting guide sequence portion
ucauccaaagaggacaguaaua

SEQ ID NO: 10159 - RNA, 22 nt, Artificial Sequence
  SAMD9 targeting guide sequence portion
uccaaagaggacaguaauagaa

SEQ ID NO: 10160 - RNA, 22 nt, Artificial Sequence
  SAMD9 targeting guide sequence portion
uccucuuuggaugacccaagag

SEQ ID NO: 10161 - RNA, 22 nt, Artificial Sequence
  SAMD9 targeting guide sequence portion
ucuauuacuguccucuuuggau

SEQ ID NO: 10162 - RNA, 22 nt, Artificial Sequence
  SAMD9 targeting guide sequence portion
ucucuugggucauccaaagagg

SEQ ID NO: 10163 - RNA, 22 nt, Artificial Sequence
  SAMD9 targeting guide sequence portion
ucuugggucauccaaagaggac

SEQ ID NO: 10164 - RNA, 22 nt, Artificial Sequence
  SAMD9 targeting guide sequence portion
ucuuuggaugacccaagagauc

SEQ ID NO: 10165 - RNA, 22 nt, Artificial Sequence
  SAMD9 targeting guide sequence portion
ugggucauccaaagaggacagu

SEQ ID NO: 10166 - RNA, 22 nt, Artificial Sequence
  SAMD9 targeting guide sequence portion
uguccucuuuggaugacccaag

SEQ ID NO: 10167 - RNA, 22 nt, Artificial Sequence
  SAMD9 targeting guide sequence portion
uuacuguccucuuuggaugacc

SEQ ID NO: 10168 - RNA, 22 nt, Artificial Sequence
  SAMD9 targeting guide sequence portion
uucuauuacuguccucuuugga

SEQ ID NO: 10169 - RNA, 22 nt, Artificial Sequence
  SAMD9 targeting guide sequence portion
uuggaugacccaagagaucccc

SEQ ID NO: 10170 - RNA, 22 nt, Artificial Sequence
  SAMD9 targeting guide sequence portion
uugggucauccaaagaggacag

SEQ ID NO: 10171 - RNA, 22 nt, Artificial Sequence
  SAMD9 targeting guide sequence portion
uuucuauuacuguccucuuugg

SEQ ID NO: 10172 - RNA, 22 nt, Artificial Sequence
  SAMD9 targeting guide sequence portion
uuuggaugacccaagagauccc

SEQ ID NO: 10173 - RNA, 20 nt, Artificial Sequence
  SAMD9 targeting guide sequence portion
aaaaccacaccaaaugagac

SEQ ID NO: 10174 - RNA, 20 nt, Artificial Sequence
  SAMD9 targeting guide sequence portion
aaaccacaccaaaugagacg

SEQ ID NO: 10175 - RNA, 20 nt, Artificial Sequence
  SAMD9 targeting guide sequence portion
aaagauuuagaguagaaauc

SEQ ID NO: 10176 - RNA, 20 nt, Artificial Sequence
  SAMD9 targeting guide sequence portion
aaaucgucucauuuggugug

SEQ ID NO: 10177 - RNA, 20 nt, Artificial Sequence
  SAMD9 targeting guide sequence portion
aaaugagacgauuucuacuc

SEQ ID NO: 10178 - RNA, 20 nt, Artificial Sequence
  SAMD9 targeting guide sequence portion
aacagaaaaccacaccaaau

SEQ ID NO: 10179 - RNA, 20 nt, Artificial Sequence
  SAMD9 targeting guide sequence portion
aaccacaccaaaugagacga

SEQ ID NO: 10180 - RNA, 20 nt, Artificial Sequence
  SAMD9 targeting guide sequence portion
aagauuuagaguagaaaucg

SEQ ID NO: 10181 - RNA, 20 nt, Artificial Sequence
  SAMD9 targeting guide sequence portion
aaucgucucauuuggugugg

SEQ ID NO: 10182 - RNA, 20 nt, Artificial Sequence
  SAMD9 targeting guide sequence portion
aaugagacgauuucuacucu

SEQ ID NO: 10183 - RNA, 20 nt, Artificial Sequence
  SAMD9 targeting guide sequence portion
acaccaaaugagacgauuuc

SEQ ID NO: 10184 - RNA, 20 nt, Artificial Sequence
  SAMD9 targeting guide sequence portion
acagaaaaccacaccaaaug

SEQ ID NO: 10185 - RNA, 20 nt, Artificial Sequence
  SAMD9 targeting guide sequence portion
accaaaugagacgauuucua

SEQ ID NO: 10186 - RNA, 20 nt, Artificial Sequence
  SAMD9 targeting guide sequence portion
accacaccaaaugagacgau

SEQ ID NO: 10187 - RNA, 20 nt, Artificial Sequence
  SAMD9 targeting guide sequence portion
acgauuucuacucuaaaucu

SEQ ID NO: 10188 - RNA, 20 nt, Artificial Sequence
  SAMD9 targeting guide sequence portion
agaaaaccacaccaaaugag

SEQ ID NO: 10189 - RNA, 20 nt, Artificial Sequence
  SAMD9 targeting guide sequence portion
agaaaucgucucauuuggug

SEQ ID NO: 10190 - RNA, 20 nt, Artificial Sequence
  SAMD9 targeting guide sequence portion
agacgauuucuacucuaaau

SEQ ID NO: 10191 - RNA, 20 nt, Artificial Sequence
  SAMD9 targeting guide sequence portion
agaguagaaaucgucucauu

SEQ ID NO: 10192 - RNA, 20 nt, Artificial Sequence
  SAMD9 targeting guide sequence portion
agauuuagaguagaaaucgu

SEQ ID NO: 10193 - RNA, 20 nt, Artificial Sequence
  SAMD9 targeting guide sequence portion
aguagaaaucgucucauuug

SEQ ID NO: 10194 - RNA, 20 nt, Artificial Sequence
  SAMD9 targeting guide sequence portion
aucgucucauuugguguggu

SEQ ID NO: 10195 - RNA, 20 nt, Artificial Sequence
  SAMD9 targeting guide sequence portion
augagacgauuucuacucua

SEQ ID NO: 10196 - RNA, 20 nt, Artificial Sequence
  SAMD9 targeting guide sequence portion
augguaaagauuuagaguag

SEQ ID NO: 10197 - RNA, 20 nt, Artificial Sequence
  SAMD9 targeting guide sequence portion
auuuagaguagaaaucgucu

SEQ ID NO: 10198 - RNA, 20 nt, Artificial Sequence
  SAMD9 targeting guide sequence portion
caaaugagacgauuucuacu

SEQ ID NO: 10199 - RNA, 20 nt, Artificial Sequence
  SAMD9 targeting guide sequence portion
cacaccaaaugagacgauuu

SEQ ID NO: 10200 - RNA, 20 nt, Artificial Sequence
  SAMD9 targeting guide sequence portion
caccaaaugagacgauuucu

SEQ ID NO: 10201 - RNA, 20 nt, Artificial Sequence
  SAMD9 targeting guide sequence portion
cagaaaaccacaccaaauga

SEQ ID NO: 10202 - RNA, 20 nt, Artificial Sequence
  SAMD9 targeting guide sequence portion
ccaaaugagacgauuucuac

SEQ ID NO: 10203 - RNA, 20 nt, Artificial Sequence
  SAMD9 targeting guide sequence portion
ccacaccaaaugagacgauu

SEQ ID NO: 10204 - RNA, 20 nt, Artificial Sequence
  SAMD9 targeting guide sequence portion
cgauuucuacucuaaaucuu

SEQ ID NO: 10205 - RNA, 20 nt, Artificial Sequence
  SAMD9 targeting guide sequence portion
cgucucauuuggugugguuu

SEQ ID NO: 10206 - RNA, 20 nt, Artificial Sequence
  SAMD9 targeting guide sequence portion
gaaaaccacaccaaaugaga

SEQ ID NO: 10207 - RNA, 20 nt, Artificial Sequence
  SAMD9 targeting guide sequence portion
gaaaucgucucauuuggugu

SEQ ID NO: 10208 - RNA, 20 nt, Artificial Sequence
  SAMD9 targeting guide sequence portion
gaacagaaaaccacaccaaa

SEQ ID NO: 10209 - RNA, 20 nt, Artificial Sequence
  SAMD9 targeting guide sequence portion
gacgauuucuacucuaaauc

SEQ ID NO: 10210 - RNA, 20 nt, Artificial Sequence
  SAMD9 targeting guide sequence portion
gagacgauuucuacucuaaa

SEQ ID NO: 10211 - RNA, 20 nt, Artificial Sequence
  SAMD9 targeting guide sequence portion
gaguagaaaucgucucauuu

SEQ ID NO: 10212 - RNA, 20 nt, Artificial Sequence
  SAMD9 targeting guide sequence portion
gauuuagaguagaaaucguc

SEQ ID NO: 10213 - RNA, 20 nt, Artificial Sequence
  SAMD9 targeting guide sequence portion
gguaaagauuuagaguagaa

SEQ ID NO: 10214 - RNA, 20 nt, Artificial Sequence
  SAMD9 targeting guide sequence portion
guaaagauuuagaguagaaa

SEQ ID NO: 10215 - RNA, 20 nt, Artificial Sequence
  SAMD9 targeting guide sequence portion
guagaaaucgucucauuugg

SEQ ID NO: 10216 - RNA, 20 nt, Artificial Sequence
  SAMD9 targeting guide sequence portion
gucucauuuggugugguuuu

SEQ ID NO: 10217 - RNA, 20 nt, Artificial Sequence
  SAMD9 targeting guide sequence portion
uaaagauuuagaguagaaau

SEQ ID NO: 10218 - RNA, 20 nt, Artificial Sequence
  SAMD9 targeting guide sequence portion
uagaaaucgucucauuuggu

SEQ ID NO: 10219 - RNA, 20 nt, Artificial Sequence
  SAMD9 targeting guide sequence portion
uagaguagaaaucgucucau

SEQ ID NO: 10220 - RNA, 20 nt, Artificial Sequence
  SAMD9 targeting guide sequence portion
ucgucucauuuggugugguu

SEQ ID NO: 10221 - RNA, 20 nt, Artificial Sequence
  SAMD9 targeting guide sequence portion
ugagacgauuucuacucuaa

SEQ ID NO: 10222 - RNA, 20 nt, Artificial Sequence
  SAMD9 targeting guide sequence portion
ugguaaagauuuagaguaga

SEQ ID NO: 10223 - RNA, 20 nt, Artificial Sequence
  SAMD9 targeting guide sequence portion
uuagaguagaaaucgucuca

SEQ ID NO: 10224 - RNA, 20 nt, Artificial Sequence
  SAMD9 targeting guide sequence portion
uuuagaguagaaaucgucuc

SEQ ID NO: 10225 - RNA, 21 nt, Artificial Sequence
  SAMD9 targeting guide sequence portion
aaaaccacaccaaaugagacg

SEQ ID NO: 10226 - RNA, 21 nt, Artificial Sequence
  SAMD9 targeting guide sequence portion
aaaccacaccaaaugagacga

SEQ ID NO: 10227 - RNA, 21 nt, Artificial Sequence
  SAMD9 targeting guide sequence portion
aaagauuuagaguagaaaucg

SEQ ID NO: 10228 - RNA, 21 nt, Artificial Sequence
  SAMD9 targeting guide sequence portion
aaaucgucucauuuggugugg

SEQ ID NO: 10229 - RNA, 21 nt, Artificial Sequence
  SAMD9 targeting guide sequence portion
aaaugagacgauuucuacucu

SEQ ID NO: 10230 - RNA, 21 nt, Artificial Sequence
  SAMD9 targeting guide sequence portion
aacagaaaaccacaccaaaug

SEQ ID NO: 10231 - RNA, 21 nt, Artificial Sequence
  SAMD9 targeting guide sequence portion
aaccacaccaaaugagacgau

SEQ ID NO: 10232 - RNA, 21 nt, Artificial Sequence
  SAMD9 targeting guide sequence portion
aagauuuagaguagaaaucgu

SEQ ID NO: 10233 - RNA, 21 nt, Artificial Sequence
  SAMD9 targeting guide sequence portion
aaucgucucauuugguguggu

SEQ ID NO: 10234 - RNA, 21 nt, Artificial Sequence
  SAMD9 targeting guide sequence portion
aaugagacgauuucuacucua

SEQ ID NO: 10235 - RNA, 21 nt, Artificial Sequence
  SAMD9 targeting guide sequence portion
acaccaaaugagacgauuucu

SEQ ID NO: 10236 - RNA, 21 nt, Artificial Sequence
  SAMD9 targeting guide sequence portion
acagaaaaccacaccaaauga

SEQ ID NO: 10237 - RNA, 21 nt, Artificial Sequence
  SAMD9 targeting guide sequence portion
accaaaugagacgauuucuac

SEQ ID NO: 10238 - RNA, 21 nt, Artificial Sequence
  SAMD9 targeting guide sequence portion
accacaccaaaugagacgauu

SEQ ID NO: 10239 - RNA, 21 nt, Artificial Sequence
  SAMD9 targeting guide sequence portion
acgauuucuacucuaaaucuu

SEQ ID NO: 10240 - RNA, 21 nt, Artificial Sequence
  SAMD9 targeting guide sequence portion
agaaaaccacaccaaaugaga

SEQ ID NO: 10241 - RNA, 21 nt, Artificial Sequence
  SAMD9 targeting guide sequence portion
agaaaucgucucauuuggugu

SEQ ID NO: 10242 - RNA, 21 nt, Artificial Sequence
  SAMD9 targeting guide sequence portion
agaacagaaaaccacaccaaa

SEQ ID NO: 10243 - RNA, 21 nt, Artificial Sequence
  SAMD9 targeting guide sequence portion
agacgauuucuacucuaaauc

SEQ ID NO: 10244 - RNA, 21 nt, Artificial Sequence
  SAMD9 targeting guide sequence portion
agaguagaaaucgucucauuu

SEQ ID NO: 10245 - RNA, 21 nt, Artificial Sequence
  SAMD9 targeting guide sequence portion
agauuuagaguagaaaucguc

SEQ ID NO: 10246 - RNA, 21 nt, Artificial Sequence
  SAMD9 targeting guide sequence portion
aguagaaaucgucucauuugg

SEQ ID NO: 10247 - RNA, 21 nt, Artificial Sequence
  SAMD9 targeting guide sequence portion
aucgucucauuuggugugguu

SEQ ID NO: 10248 - RNA, 21 nt, Artificial Sequence
  SAMD9 targeting guide sequence portion
augagacgauuucuacucuaa

SEQ ID NO: 10249 - RNA, 21 nt, Artificial Sequence
  SAMD9 targeting guide sequence portion
augguaaagauuuagaguaga

SEQ ID NO: 10250 - RNA, 21 nt, Artificial Sequence
  SAMD9 targeting guide sequence portion
auuuagaguagaaaucgucuc

SEQ ID NO: 10251 - RNA, 21 nt, Artificial Sequence
  SAMD9 targeting guide sequence portion
caaaugagacgauuucuacuc

SEQ ID NO: 10252 - RNA, 21 nt, Artificial Sequence
  SAMD9 targeting guide sequence portion
cacaccaaaugagacgauuuc

SEQ ID NO: 10253 - RNA, 21 nt, Artificial Sequence
  SAMD9 targeting guide sequence portion
caccaaaugagacgauuucua

SEQ ID NO: 10254 - RNA, 21 nt, Artificial Sequence
  SAMD9 targeting guide sequence portion
cagaaaaccacaccaaaugag

SEQ ID NO: 10255 - RNA, 21 nt, Artificial Sequence
  SAMD9 targeting guide sequence portion
ccaaaugagacgauuucuacu

SEQ ID NO: 10256 - RNA, 21 nt, Artificial Sequence
  SAMD9 targeting guide sequence portion
ccacaccaaaugagacgauuu

SEQ ID NO: 10257 - RNA, 21 nt, Artificial Sequence
  SAMD9 targeting guide sequence portion
cgauuucuacucuaaaucuuu

SEQ ID NO: 10258 - RNA, 21 nt, Artificial Sequence
  SAMD9 targeting guide sequence portion
cgucucauuuggugugguuuu

SEQ ID NO: 10259 - RNA, 21 nt, Artificial Sequence
  SAMD9 targeting guide sequence portion
gaaaaccacaccaaaugagac

SEQ ID NO: 10260 - RNA, 21 nt, Artificial Sequence
  SAMD9 targeting guide sequence portion
gaaaucgucucauuuggugug

SEQ ID NO: 10261 - RNA, 21 nt, Artificial Sequence
  SAMD9 targeting guide sequence portion
gaacagaaaaccacaccaaau

SEQ ID NO: 10262 - RNA, 21 nt, Artificial Sequence
  SAMD9 targeting guide sequence portion
gacgauuucuacucuaaaucu

SEQ ID NO: 10263 - RNA, 21 nt, Artificial Sequence
  SAMD9 targeting guide sequence portion
gagacgauuucuacucuaaau

SEQ ID NO: 10264 - RNA, 21 nt, Artificial Sequence
  SAMD9 targeting guide sequence portion
gaguagaaaucgucucauuug

SEQ ID NO: 10265 - RNA, 21 nt, Artificial Sequence
  SAMD9 targeting guide sequence portion
gaugguaaagauuuagaguag

SEQ ID NO: 10266 - RNA, 21 nt, Artificial Sequence
  SAMD9 targeting guide sequence portion
gauuuagaguagaaaucgucu

SEQ ID NO: 10267 - RNA, 21 nt, Artificial Sequence
  SAMD9 targeting guide sequence portion
gguaaagauuuagaguagaaa

SEQ ID NO: 10268 - RNA, 21 nt, Artificial Sequence
  SAMD9 targeting guide sequence portion
guaaagauuuagaguagaaau

SEQ ID NO: 10269 - RNA, 21 nt, Artificial Sequence
  SAMD9 targeting guide sequence portion
guagaaaucgucucauuuggu

SEQ ID NO: 10270 - RNA, 21 nt, Artificial Sequence
  SAMD9 targeting guide sequence portion
gucucauuuggugugguuuuc

SEQ ID NO: 10271 - RNA, 21 nt, Artificial Sequence
  SAMD9 targeting guide sequence portion
uaaagauuuagaguagaaauc

SEQ ID NO: 10272 - RNA, 21 nt, Artificial Sequence
  SAMD9 targeting guide sequence portion
uagaaaucgucucauuuggug

SEQ ID NO: 10273 - RNA, 21 nt, Artificial Sequence
  SAMD9 targeting guide sequence portion
uagaguagaaaucgucucauu

SEQ ID NO: 10274 - RNA, 21 nt, Artificial Sequence
  SAMD9 targeting guide sequence portion
ucgucucauuuggugugguuu

SEQ ID NO: 10275 - RNA, 21 nt, Artificial Sequence
  SAMD9 targeting guide sequence portion
ugagacgauuucuacucuaaa

SEQ ID NO: 10276 - RNA, 21 nt, Artificial Sequence
  SAMD9 targeting guide sequence portion
ugguaaagauuuagaguagaa

SEQ ID NO: 10277 - RNA, 21 nt, Artificial Sequence
  SAMD9 targeting guide sequence portion
uuagaguagaaaucgucucau

SEQ ID NO: 10278 - RNA, 21 nt, Artificial Sequence
  SAMD9 targeting guide sequence portion
uuuagaguagaaaucgucuca

SEQ ID NO: 10279 - RNA, 22 nt, Artificial Sequence
  SAMD9 targeting guide sequence portion
aaaaccacaccaaaugagacga

SEQ ID NO: 10280 - RNA, 22 nt, Artificial Sequence
  SAMD9 targeting guide sequence portion
aaaccacaccaaaugagacgau

SEQ ID NO: 10281 - RNA, 22 nt, Artificial Sequence
  SAMD9 targeting guide sequence portion
aaagauuuagaguagaaaucgu

SEQ ID NO: 10282 - RNA, 22 nt, Artificial Sequence
  SAMD9 targeting guide sequence portion
aaaucgucucauuugguguggu

SEQ ID NO: 10283 - RNA, 22 nt, Artificial Sequence
  SAMD9 targeting guide sequence portion
aaaugagacgauuucuacucua

SEQ ID NO: 10284 - RNA, 22 nt, Artificial Sequence
  SAMD9 targeting guide sequence portion
aacagaaaaccacaccaaauga

SEQ ID NO: 10285 - RNA, 22 nt, Artificial Sequence
  SAMD9 targeting guide sequence portion
aaccacaccaaaugagacgauu

SEQ ID NO: 10286 - RNA, 22 nt, Artificial Sequence
  SAMD9 targeting guide sequence portion
aagauuuagaguagaaaucguc

SEQ ID NO: 10287 - RNA, 22 nt, Artificial Sequence
  SAMD9 targeting guide sequence portion
aaucgucucauuuggugugguu

SEQ ID NO: 10288 - RNA, 22 nt, Artificial Sequence
  SAMD9 targeting guide sequence portion
aaugagacgauuucuacucuaa

SEQ ID NO: 10289 - RNA, 22 nt, Artificial Sequence
  SAMD9 targeting guide sequence portion
acaccaaaugagacgauuucua

SEQ ID NO: 10290 - RNA, 22 nt, Artificial Sequence
  SAMD9 targeting guide sequence portion
acagaaaaccacaccaaaugag

SEQ ID NO: 10291 - RNA, 22 nt, Artificial Sequence
  SAMD9 targeting guide sequence portion
accaaaugagacgauuucuacu

SEQ ID NO: 10292 - RNA, 22 nt, Artificial Sequence
  SAMD9 targeting guide sequence portion
accacaccaaaugagacgauuu

SEQ ID NO: 10293 - RNA, 22 nt, Artificial Sequence
  SAMD9 targeting guide sequence portion
acgauuucuacucuaaaucuuu

SEQ ID NO: 10294 - RNA, 22 nt, Artificial Sequence
  SAMD9 targeting guide sequence portion
agaaaaccacaccaaaugagac

SEQ ID NO: 10295 - RNA, 22 nt, Artificial Sequence
  SAMD9 targeting guide sequence portion
agaaaucgucucauuuggugug

SEQ ID NO: 10296 - RNA, 22 nt, Artificial Sequence
  SAMD9 targeting guide sequence portion
agaacagaaaaccacaccaaau

SEQ ID NO: 10297 - RNA, 22 nt, Artificial Sequence
  SAMD9 targeting guide sequence portion
agacgauuucuacucuaaaucu

SEQ ID NO: 10298 - RNA, 22 nt, Artificial Sequence
  SAMD9 targeting guide sequence portion
agaguagaaaucgucucauuug

SEQ ID NO: 10299 - RNA, 22 nt, Artificial Sequence
  SAMD9 targeting guide sequence portion
agauuuagaguagaaaucgucu

SEQ ID NO: 10300 - RNA, 22 nt, Artificial Sequence
  SAMD9 targeting guide sequence portion
aguagaaaucgucucauuuggu

SEQ ID NO: 10301 - RNA, 22 nt, Artificial Sequence
  SAMD9 targeting guide sequence portion
aucgucucauuuggugugguuu

SEQ ID NO: 10302 - RNA, 22 nt, Artificial Sequence
  SAMD9 targeting guide sequence portion
augagacgauuucuacucuaaa

SEQ ID NO: 10303 - RNA, 22 nt, Artificial Sequence
  SAMD9 targeting guide sequence portion
augguaaagauuuagaguagaa

SEQ ID NO: 10304 - RNA, 22 nt, Artificial Sequence
  SAMD9 targeting guide sequence portion
auuuagaguagaaaucgucuca

SEQ ID NO: 10305 - RNA, 22 nt, Artificial Sequence
  SAMD9 targeting guide sequence portion
caaaugagacgauuucuacucu

SEQ ID NO: 10306 - RNA, 22 nt, Artificial Sequence
  SAMD9 targeting guide sequence portion
cacaccaaaugagacgauuucu

SEQ ID NO: 10307 - RNA, 22 nt, Artificial Sequence
  SAMD9 targeting guide sequence portion
caccaaaugagacgauuucuac

SEQ ID NO: 10308 - RNA, 22 nt, Artificial Sequence
  SAMD9 targeting guide sequence portion
cagaaaaccacaccaaaugaga

SEQ ID NO: 10309 - RNA, 22 nt, Artificial Sequence
  SAMD9 targeting guide sequence portion
ccaaaugagacgauuucuacuc

SEQ ID NO: 10310 - RNA, 22 nt, Artificial Sequence
  SAMD9 targeting guide sequence portion
ccacaccaaaugagacgauuuc

SEQ ID NO: 10311 - RNA, 22 nt, Artificial Sequence
  SAMD9 targeting guide sequence portion
cgauuucuacucuaaaucuuua

SEQ ID NO: 10312 - RNA, 22 nt, Artificial Sequence
  SAMD9 targeting guide sequence portion
cgucucauuuggugugguuuuc

SEQ ID NO: 10313 - RNA, 22 nt, Artificial Sequence
  SAMD9 targeting guide sequence portion
gaaaaccacaccaaaugagacg

SEQ ID NO: 10314 - RNA, 22 nt, Artificial Sequence
  SAMD9 targeting guide sequence portion
gaaaucgucucauuuggugugg

SEQ ID NO: 10315 - RNA, 22 nt, Artificial Sequence
  SAMD9 targeting guide sequence portion
gaacagaaaaccacaccaaaug

SEQ ID NO: 10316 - RNA, 22 nt, Artificial Sequence
  SAMD9 targeting guide sequence portion
gacgauuucuacucuaaaucuu

SEQ ID NO: 10317 - RNA, 22 nt, Artificial Sequence
  SAMD9 targeting guide sequence portion
gagacgauuucuacucuaaauc

SEQ ID NO: 10318 - RNA, 22 nt, Artificial Sequence
  SAMD9 targeting guide sequence portion
gaguagaaaucgucucauuugg

SEQ ID NO: 10319 - RNA, 22 nt, Artificial Sequence
  SAMD9 targeting guide sequence portion
gaugguaaagauuuagaguaga

SEQ ID NO: 10320 - RNA, 22 nt, Artificial Sequence
  SAMD9 targeting guide sequence portion
gauuuagaguagaaaucgucuc

SEQ ID NO: 10321 - RNA, 22 nt, Artificial Sequence
  SAMD9 targeting guide sequence portion
gguaaagauuuagaguagaaau

SEQ ID NO: 10322 - RNA, 22 nt, Artificial Sequence
  SAMD9 targeting guide sequence portion
guaaagauuuagaguagaaauc

SEQ ID NO: 10323 - RNA, 22 nt, Artificial Sequence
  SAMD9 targeting guide sequence portion
guagaaaucgucucauuuggug

SEQ ID NO: 10324 - RNA, 22 nt, Artificial Sequence
  SAMD9 targeting guide sequence portion
gucucauuuggugugguuuucu

SEQ ID NO: 10325 - RNA, 22 nt, Artificial Sequence
  SAMD9 targeting guide sequence portion
uaaagauuuagaguagaaaucg

SEQ ID NO: 10326 - RNA, 22 nt, Artificial Sequence
  SAMD9 targeting guide sequence portion
uagaaaucgucucauuuggugu

SEQ ID NO: 10327 - RNA, 22 nt, Artificial Sequence
  SAMD9 targeting guide sequence portion
uagaacagaaaaccacaccaaa

SEQ ID NO: 10328 - RNA, 22 nt, Artificial Sequence
  SAMD9 targeting guide sequence portion
uagaguagaaaucgucucauuu

SEQ ID NO: 10329 - RNA, 22 nt, Artificial Sequence
  SAMD9 targeting guide sequence portion
ucgucucauuuggugugguuuu

SEQ ID NO: 10330 - RNA, 22 nt, Artificial Sequence
  SAMD9 targeting guide sequence portion
ugagacgauuucuacucuaaau

SEQ ID NO: 10331 - RNA, 22 nt, Artificial Sequence
  SAMD9 targeting guide sequence portion
ugaugguaaagauuuagaguag

SEQ ID NO: 10332 - RNA, 22 nt, Artificial Sequence
  SAMD9 targeting guide sequence portion
ugguaaagauuuagaguagaaa

SEQ ID NO: 10333 - RNA, 22 nt, Artificial Sequence
  SAMD9 targeting guide sequence portion
uuagaguagaaaucgucucauu

SEQ ID NO: 10334 - RNA, 22 nt, Artificial Sequence
  SAMD9 targeting guide sequence portion
uuuagaguagaaaucgucucau

SEQ ID NO: 10335 - RNA, 20 nt, Artificial Sequence
  SAMD9 targeting guide sequence portion
aaaaccacaccaaaugagau

SEQ ID NO: 10336 - RNA, 20 nt, Artificial Sequence
  SAMD9 targeting guide sequence portion
aaaccacaccaaaugagaug

SEQ ID NO: 10337 - RNA, 20 nt, Artificial Sequence
  SAMD9 targeting guide sequence portion
aaaucaucucauuuggugug

SEQ ID NO: 10338 - RNA, 20 nt, Artificial Sequence
  SAMD9 targeting guide sequence portion
aaaugagaugauuucuacuc

SEQ ID NO: 10339 - RNA, 20 nt, Artificial Sequence
  SAMD9 targeting guide sequence portion
aaccacaccaaaugagauga

SEQ ID NO: 10340 - RNA, 20 nt, Artificial Sequence
  SAMD9 targeting guide sequence portion
aagauuuagaguagaaauca

SEQ ID NO: 10341 - RNA, 20 nt, Artificial Sequence
  SAMD9 targeting guide sequence portion
aaucaucucauuuggugugg

SEQ ID NO: 10342 - RNA, 20 nt, Artificial Sequence
  SAMD9 targeting guide sequence portion
aaugagaugauuucuacucu

SEQ ID NO: 10343 - RNA, 20 nt, Artificial Sequence
  SAMD9 targeting guide sequence portion
acaccaaaugagaugauuuc

SEQ ID NO: 10344 - RNA, 20 nt, Artificial Sequence
  SAMD9 targeting guide sequence portion
accaaaugagaugauuucua

SEQ ID NO: 10345 - RNA, 20 nt, Artificial Sequence
  SAMD9 targeting guide sequence portion
accacaccaaaugagaugau

SEQ ID NO: 10346 - RNA, 20 nt, Artificial Sequence
  SAMD9 targeting guide sequence portion
agaaaucaucucauuuggug

SEQ ID NO: 10347 - RNA, 20 nt, Artificial Sequence
  SAMD9 targeting guide sequence portion
agaguagaaaucaucucauu

SEQ ID NO: 10348 - RNA, 20 nt, Artificial Sequence
  SAMD9 targeting guide sequence portion
agaugauuucuacucuaaau

SEQ ID NO: 10349 - RNA, 20 nt, Artificial Sequence
  SAMD9 targeting guide sequence portion
agauuuagaguagaaaucau

SEQ ID NO: 10350 - RNA, 20 nt, Artificial Sequence
  SAMD9 targeting guide sequence portion
aguagaaaucaucucauuug

SEQ ID NO: 10351 - RNA, 20 nt, Artificial Sequence
  SAMD9 targeting guide sequence portion
aucaucucauuugguguggu

SEQ ID NO: 10352 - RNA, 20 nt, Artificial Sequence
  SAMD9 targeting guide sequence portion
aucucauuuggugugguuuu

SEQ ID NO: 10353 - RNA, 20 nt, Artificial Sequence
  SAMD9 targeting guide sequence portion
augagaugauuucuacucua

SEQ ID NO: 10354 - RNA, 20 nt, Artificial Sequence
  SAMD9 targeting guide sequence portion
augauuucuacucuaaaucu

SEQ ID NO: 10355 - RNA, 20 nt, Artificial Sequence
  SAMD9 targeting guide sequence portion
auuuagaguagaaaucaucu

SEQ ID NO: 10356 - RNA, 20 nt, Artificial Sequence
  SAMD9 targeting guide sequence portion
caaaugagaugauuucuacu

SEQ ID NO: 10357 - RNA, 20 nt, Artificial Sequence
  SAMD9 targeting guide sequence portion
cacaccaaaugagaugauuu

SEQ ID NO: 10358 - RNA, 20 nt, Artificial Sequence
  SAMD9 targeting guide sequence portion
caccaaaugagaugauuucu

SEQ ID NO: 10359 - RNA, 20 nt, Artificial Sequence
  SAMD9 targeting guide sequence portion
caucucauuuggugugguuu

SEQ ID NO: 10360 - RNA, 20 nt, Artificial Sequence
  SAMD9 targeting guide sequence portion
ccaaaugagaugauuucuac

SEQ ID NO: 10361 - RNA, 20 nt, Artificial Sequence
  SAMD9 targeting guide sequence portion
ccacaccaaaugagaugauu

SEQ ID NO: 10362 - RNA, 20 nt, Artificial Sequence
  SAMD9 targeting guide sequence portion
gaaaucaucucauuuggugu

SEQ ID NO: 10363 - RNA, 20 nt, Artificial Sequence
  SAMD9 targeting guide sequence portion
gagaugauuucuacucuaaa

SEQ ID NO: 10364 - RNA, 20 nt, Artificial Sequence
  SAMD9 targeting guide sequence portion
gaguagaaaucaucucauuu

SEQ ID NO: 10365 - RNA, 20 nt, Artificial Sequence
  SAMD9 targeting guide sequence portion
gaugauuucuacucuaaauc

SEQ ID NO: 10366 - RNA, 20 nt, Artificial Sequence
  SAMD9 targeting guide sequence portion
gauuuagaguagaaaucauc

SEQ ID NO: 10367 - RNA, 20 nt, Artificial Sequence
  SAMD9 targeting guide sequence portion
guagaaaucaucucauuugg

SEQ ID NO: 10368 - RNA, 20 nt, Artificial Sequence
  SAMD9 targeting guide sequence portion
uagaaaucaucucauuuggu

SEQ ID NO: 10369 - RNA, 20 nt, Artificial Sequence
  SAMD9 targeting guide sequence portion
uagaguagaaaucaucucau

SEQ ID NO: 10370 - RNA, 20 nt, Artificial Sequence
  SAMD9 targeting guide sequence portion
ucaucucauuuggugugguu

SEQ ID NO: 10371 - RNA, 20 nt, Artificial Sequence
  SAMD9 targeting guide sequence portion
ugagaugauuucuacucuaa

SEQ ID NO: 10372 - RNA, 20 nt, Artificial Sequence
  SAMD9 targeting guide sequence portion
ugauuucuacucuaaaucuu

SEQ ID NO: 10373 - RNA, 20 nt, Artificial Sequence
  SAMD9 targeting guide sequence portion
uuagaguagaaaucaucuca

SEQ ID NO: 10374 - RNA, 20 nt, Artificial Sequence
  SAMD9 targeting guide sequence portion
uuuagaguagaaaucaucuc

SEQ ID NO: 10375 - RNA, 21 nt, Artificial Sequence
  SAMD9 targeting guide sequence portion
aaaaccacaccaaaugagaug

SEQ ID NO: 10376 - RNA, 21 nt, Artificial Sequence
  SAMD9 targeting guide sequence portion
aaaccacaccaaaugagauga

SEQ ID NO: 10377 - RNA, 21 nt, Artificial Sequence
  SAMD9 targeting guide sequence portion
aaagauuuagaguagaaauca

SEQ ID NO: 10378 - RNA, 21 nt, Artificial Sequence
  SAMD9 targeting guide sequence portion
aaaucaucucauuuggugugg

SEQ ID NO: 10379 - RNA, 21 nt, Artificial Sequence
  SAMD9 targeting guide sequence portion
aaaugagaugauuucuacucu

SEQ ID NO: 10380 - RNA, 21 nt, Artificial Sequence
  SAMD9 targeting guide sequence portion
aaccacaccaaaugagaugau

SEQ ID NO: 10381 - RNA, 21 nt, Artificial Sequence
  SAMD9 targeting guide sequence portion
aagauuuagaguagaaaucau

SEQ ID NO: 10382 - RNA, 21 nt, Artificial Sequence
  SAMD9 targeting guide sequence portion
aaucaucucauuugguguggu

SEQ ID NO: 10383 - RNA, 21 nt, Artificial Sequence
  SAMD9 targeting guide sequence portion
aaugagaugauuucuacucua

SEQ ID NO: 10384 - RNA, 21 nt, Artificial Sequence
  SAMD9 targeting guide sequence portion
acaccaaaugagaugauuucu

SEQ ID NO: 10385 - RNA, 21 nt, Artificial Sequence
  SAMD9 targeting guide sequence portion
accaaaugagaugauuucuac

SEQ ID NO: 10386 - RNA, 21 nt, Artificial Sequence
  SAMD9 targeting guide sequence portion
accacaccaaaugagaugauu

SEQ ID NO: 10387 - RNA, 21 nt, Artificial Sequence
  SAMD9 targeting guide sequence portion
agaaaucaucucauuuggugu

SEQ ID NO: 10388 - RNA, 21 nt, Artificial Sequence
  SAMD9 targeting guide sequence portion
agaguagaaaucaucucauuu

SEQ ID NO: 10389 - RNA, 21 nt, Artificial Sequence
  SAMD9 targeting guide sequence portion
agaugauuucuacucuaaauc

SEQ ID NO: 10390 - RNA, 21 nt, Artificial Sequence
  SAMD9 targeting guide sequence portion
agauuuagaguagaaaucauc

SEQ ID NO: 10391 - RNA, 21 nt, Artificial Sequence
  SAMD9 targeting guide sequence portion
aguagaaaucaucucauuugg

SEQ ID NO: 10392 - RNA, 21 nt, Artificial Sequence
  SAMD9 targeting guide sequence portion
aucaucucauuuggugugguu

SEQ ID NO: 10393 - RNA, 21 nt, Artificial Sequence
  SAMD9 targeting guide sequence portion
aucucauuuggugugguuuuc

SEQ ID NO: 10394 - RNA, 21 nt, Artificial Sequence
  SAMD9 targeting guide sequence portion
augagaugauuucuacucuaa

SEQ ID NO: 10395 - RNA, 21 nt, Artificial Sequence
  SAMD9 targeting guide sequence portion
augauuucuacucuaaaucuu

SEQ ID NO: 10396 - RNA, 21 nt, Artificial Sequence
  SAMD9 targeting guide sequence portion
auuuagaguagaaaucaucuc

SEQ ID NO: 10397 - RNA, 21 nt, Artificial Sequence
  SAMD9 targeting guide sequence portion
caaaugagaugauuucuacuc

SEQ ID NO: 10398 - RNA, 21 nt, Artificial Sequence
  SAMD9 targeting guide sequence portion
cacaccaaaugagaugauuuc

SEQ ID NO: 10399 - RNA, 21 nt, Artificial Sequence
  SAMD9 targeting guide sequence portion
caccaaaugagaugauuucua

SEQ ID NO: 10400 - RNA, 21 nt, Artificial Sequence
  SAMD9 targeting guide sequence portion
caucucauuuggugugguuuu

SEQ ID NO: 10401 - RNA, 21 nt, Artificial Sequence
  SAMD9 targeting guide sequence portion
ccaaaugagaugauuucuacu

SEQ ID NO: 10402 - RNA, 21 nt, Artificial Sequence
  SAMD9 targeting guide sequence portion
ccacaccaaaugagaugauuu

SEQ ID NO: 10403 - RNA, 21 nt, Artificial Sequence
  SAMD9 targeting guide sequence portion
gaaaaccacaccaaaugagau

SEQ ID NO: 10404 - RNA, 21 nt, Artificial Sequence
  SAMD9 targeting guide sequence portion
gaaaucaucucauuuggugug

SEQ ID NO: 10405 - RNA, 21 nt, Artificial Sequence
  SAMD9 targeting guide sequence portion
gagaugauuucuacucuaaau

SEQ ID NO: 10406 - RNA, 21 nt, Artificial Sequence
  SAMD9 targeting guide sequence portion
gaguagaaaucaucucauuug

SEQ ID NO: 10407 - RNA, 21 nt, Artificial Sequence
  SAMD9 targeting guide sequence portion
gaugauuucuacucuaaaucu

SEQ ID NO: 10408 - RNA, 21 nt, Artificial Sequence
  SAMD9 targeting guide sequence portion
gauuuagaguagaaaucaucu

SEQ ID NO: 10409 - RNA, 21 nt, Artificial Sequence
  SAMD9 targeting guide sequence portion
guagaaaucaucucauuuggu

SEQ ID NO: 10410 - RNA, 21 nt, Artificial Sequence
  SAMD9 targeting guide sequence portion
uagaaaucaucucauuuggug

SEQ ID NO: 10411 - RNA, 21 nt, Artificial Sequence
  SAMD9 targeting guide sequence portion
uagaguagaaaucaucucauu

SEQ ID NO: 10412 - RNA, 21 nt, Artificial Sequence
  SAMD9 targeting guide sequence portion
ucaucucauuuggugugguuu

SEQ ID NO: 10413 - RNA, 21 nt, Artificial Sequence
  SAMD9 targeting guide sequence portion
ugagaugauuucuacucuaaa

SEQ ID NO: 10414 - RNA, 21 nt, Artificial Sequence
  SAMD9 targeting guide sequence portion
ugauuucuacucuaaaucuuu

SEQ ID NO: 10415 - RNA, 21 nt, Artificial Sequence
  SAMD9 targeting guide sequence portion
uuagaguagaaaucaucucau

SEQ ID NO: 10416 - RNA, 21 nt, Artificial Sequence
  SAMD9 targeting guide sequence portion
uuuagaguagaaaucaucuca

SEQ ID NO: 10417 - RNA, 22 nt, Artificial Sequence
  SAMD9 targeting guide sequence portion
aaaaccacaccaaaugagauga

SEQ ID NO: 10418 - RNA, 22 nt, Artificial Sequence
  SAMD9 targeting guide sequence portion
aaaccacaccaaaugagaugau

SEQ ID NO: 10419 - RNA, 22 nt, Artificial Sequence
  SAMD9 targeting guide sequence portion
aaagauuuagaguagaaaucau

SEQ ID NO: 10420 - RNA, 22 nt, Artificial Sequence
  SAMD9 targeting guide sequence portion
aaaucaucucauuugguguggu

SEQ ID NO: 10421 - RNA, 22 nt, Artificial Sequence
  SAMD9 targeting guide sequence portion
aaaugagaugauuucuacucua

SEQ ID NO: 10422 - RNA, 22 nt, Artificial Sequence
  SAMD9 targeting guide sequence portion
aaccacaccaaaugagaugauu

SEQ ID NO: 10423 - RNA, 22 nt, Artificial Sequence
  SAMD9 targeting guide sequence portion
aagauuuagaguagaaaucauc

SEQ ID NO: 10424 - RNA, 22 nt, Artificial Sequence
  SAMD9 targeting guide sequence portion
aaucaucucauuuggugugguu

SEQ ID NO: 10425 - RNA, 22 nt, Artificial Sequence
  SAMD9 targeting guide sequence portion
aaugagaugauuucuacucuaa

SEQ ID NO: 10426 - RNA, 22 nt, Artificial Sequence
  SAMD9 targeting guide sequence portion
acaccaaaugagaugauuucua

SEQ ID NO: 10427 - RNA, 22 nt, Artificial Sequence
  SAMD9 targeting guide sequence portion
accaaaugagaugauuucuacu

SEQ ID NO: 10428 - RNA, 22 nt, Artificial Sequence
  SAMD9 targeting guide sequence portion
accacaccaaaugagaugauuu

SEQ ID NO: 10429 - RNA, 22 nt, Artificial Sequence
  SAMD9 targeting guide sequence portion
agaaaaccacaccaaaugagau

SEQ ID NO: 10430 - RNA, 22 nt, Artificial Sequence
  SAMD9 targeting guide sequence portion
agaaaucaucucauuuggugug

SEQ ID NO: 10431 - RNA, 22 nt, Artificial Sequence
  SAMD9 targeting guide sequence portion
agaguagaaaucaucucauuug

SEQ ID NO: 10432 - RNA, 22 nt, Artificial Sequence
  SAMD9 targeting guide sequence portion
agaugauuucuacucuaaaucu

SEQ ID NO: 10433 - RNA, 22 nt, Artificial Sequence
  SAMD9 targeting guide sequence portion
agauuuagaguagaaaucaucu

SEQ ID NO: 10434 - RNA, 22 nt, Artificial Sequence
  SAMD9 targeting guide sequence portion
aguagaaaucaucucauuuggu

SEQ ID NO: 10435 - RNA, 22 nt, Artificial Sequence
  SAMD9 targeting guide sequence portion
aucaucucauuuggugugguuu

SEQ ID NO: 10436 - RNA, 22 nt, Artificial Sequence
  SAMD9 targeting guide sequence portion
aucucauuuggugugguuuucu

SEQ ID NO: 10437 - RNA, 22 nt, Artificial Sequence
  SAMD9 targeting guide sequence portion
augagaugauuucuacucuaaa

SEQ ID NO: 10438 - RNA, 22 nt, Artificial Sequence
  SAMD9 targeting guide sequence portion
augauuucuacucuaaaucuuu

SEQ ID NO: 10439 - RNA, 22 nt, Artificial Sequence
  SAMD9 targeting guide sequence portion
auuuagaguagaaaucaucuca

SEQ ID NO: 10440 - RNA, 22 nt, Artificial Sequence
  SAMD9 targeting guide sequence portion
caaaugagaugauuucuacucu

SEQ ID NO: 10441 - RNA, 22 nt, Artificial Sequence
  SAMD9 targeting guide sequence portion
cacaccaaaugagaugauuucu

SEQ ID NO: 10442 - RNA, 22 nt, Artificial Sequence
  SAMD9 targeting guide sequence portion
caccaaaugagaugauuucuac

SEQ ID NO: 10443 - RNA, 22 nt, Artificial Sequence
  SAMD9 targeting guide sequence portion
caucucauuuggugugguuuuc

SEQ ID NO: 10444 - RNA, 22 nt, Artificial Sequence
  SAMD9 targeting guide sequence portion
ccaaaugagaugauuucuacuc

SEQ ID NO: 10445 - RNA, 22 nt, Artificial Sequence
  SAMD9 targeting guide sequence portion
ccacaccaaaugagaugauuuc

SEQ ID NO: 10446 - RNA, 22 nt, Artificial Sequence
  SAMD9 targeting guide sequence portion
gaaaaccacaccaaaugagaug

SEQ ID NO: 10447 - RNA, 22 nt, Artificial Sequence
  SAMD9 targeting guide sequence portion
gaaaucaucucauuuggugugg

SEQ ID NO: 10448 - RNA, 22 nt, Artificial Sequence
  SAMD9 targeting guide sequence portion
gagaugauuucuacucuaaauc

SEQ ID NO: 10449 - RNA, 22 nt, Artificial Sequence
  SAMD9 targeting guide sequence portion
gaguagaaaucaucucauuugg

SEQ ID NO: 10450 - RNA, 22 nt, Artificial Sequence
  SAMD9 targeting guide sequence portion
gaugauuucuacucuaaaucuu

SEQ ID NO: 10451 - RNA, 22 nt, Artificial Sequence
  SAMD9 targeting guide sequence portion
gauuuagaguagaaaucaucuc

SEQ ID NO: 10452 - RNA, 22 nt, Artificial Sequence
  SAMD9 targeting guide sequence portion
guagaaaucaucucauuuggug

SEQ ID NO: 10453 - RNA, 22 nt, Artificial Sequence
  SAMD9 targeting guide sequence portion
uaaagauuuagaguagaaauca

SEQ ID NO: 10454 - RNA, 22 nt, Artificial Sequence
  SAMD9 targeting guide sequence portion
uagaaaucaucucauuuggugu

SEQ ID NO: 10455 - RNA, 22 nt, Artificial Sequence
  SAMD9 targeting guide sequence portion
uagaguagaaaucaucucauuu

SEQ ID NO: 10456 - RNA, 22 nt, Artificial Sequence
  SAMD9 targeting guide sequence portion
ucaucucauuuggugugguuuu

SEQ ID NO: 10457 - RNA, 22 nt, Artificial Sequence
  SAMD9 targeting guide sequence portion
ugagaugauuucuacucuaaau

SEQ ID NO: 10458 - RNA, 22 nt, Artificial Sequence
  SAMD9 targeting guide sequence portion
ugauuucuacucuaaaucuuua

SEQ ID NO: 10459 - RNA, 22 nt, Artificial Sequence
  SAMD9 targeting guide sequence portion
uuagaguagaaaucaucucauu

SEQ ID NO: 10460 - RNA, 22 nt, Artificial Sequence
  SAMD9 targeting guide sequence portion
uuuagaguagaaaucaucucau

SEQ ID NO: 10461 - RNA, 20 nt, Artificial Sequence
  SAMD9 targeting guide sequence portion
aaauaaucauauuggcauuc

SEQ ID NO: 10462 - RNA, 20 nt, Artificial Sequence
  SAMD9 targeting guide sequence portion
aauaaucauauuggcauuca

SEQ ID NO: 10463 - RNA, 20 nt, Artificial Sequence
  SAMD9 targeting guide sequence portion
aauaugauuauuuccagauu

SEQ ID NO: 10464 - RNA, 20 nt, Artificial Sequence
  SAMD9 targeting guide sequence portion
aaucuggaaauaaucauauu

SEQ ID NO: 10465 - RNA, 20 nt, Artificial Sequence
  SAMD9 targeting guide sequence portion
aaugccaauaugauuauuuc

SEQ ID NO: 10466 - RNA, 20 nt, Artificial Sequence
  SAMD9 targeting guide sequence portion
aauuuugcauuuuaaucugg

SEQ ID NO: 10467 - RNA, 20 nt, Artificial Sequence
  SAMD9 targeting guide sequence portion
aguucucugaaugccaauau

SEQ ID NO: 10468 - RNA, 20 nt, Artificial Sequence
  SAMD9 targeting guide sequence portion
auaaucauauuggcauucag

SEQ ID NO: 10469 - RNA, 20 nt, Artificial Sequence
  SAMD9 targeting guide sequence portion
aucuggaaauaaucauauug

SEQ ID NO: 10470 - RNA, 20 nt, Artificial Sequence
  SAMD9 targeting guide sequence portion
augccaauaugauuauuucc

SEQ ID NO: 10471 - RNA, 20 nt, Artificial Sequence
  SAMD9 targeting guide sequence portion
auuuccagauuaaaaugcaa

SEQ ID NO: 10472 - RNA, 20 nt, Artificial Sequence
  SAMD9 targeting guide sequence portion
auuuuaaucuggaaauaauc

SEQ ID NO: 10473 - RNA, 20 nt, Artificial Sequence
  SAMD9 targeting guide sequence portion
auuuugcauuuuaaucugga

SEQ ID NO: 10474 - RNA, 20 nt, Artificial Sequence
  SAMD9 targeting guide sequence portion
caauaugauuauuuccagau

SEQ ID NO: 10475 - RNA, 20 nt, Artificial Sequence
  SAMD9 targeting guide sequence portion
cauuuuaaucuggaaauaau

SEQ ID NO: 10476 - RNA, 20 nt, Artificial Sequence
  SAMD9 targeting guide sequence portion
ccaauaugauuauuuccaga

SEQ ID NO: 10477 - RNA, 20 nt, Artificial Sequence
  SAMD9 targeting guide sequence portion
cucugaaugccaauaugauu

SEQ ID NO: 10478 - RNA, 20 nt, Artificial Sequence
  SAMD9 targeting guide sequence portion
cugaaugccaauaugauuau

SEQ ID NO: 10479 - RNA, 20 nt, Artificial Sequence
  SAMD9 targeting guide sequence portion
cuggaaauaaucauauuggc

SEQ ID NO: 10480 - RNA, 20 nt, Artificial Sequence
  SAMD9 targeting guide sequence portion
gaaauaaucauauuggcauu

SEQ ID NO: 10481 - RNA, 20 nt, Artificial Sequence
  SAMD9 targeting guide sequence portion
gaaugccaauaugauuauuu

SEQ ID NO: 10482 - RNA, 20 nt, Artificial Sequence
  SAMD9 targeting guide sequence portion
gcauuuuaaucuggaaauaa

SEQ ID NO: 10483 - RNA, 20 nt, Artificial Sequence
  SAMD9 targeting guide sequence portion
gccaauaugauuauuuccag

SEQ ID NO: 10484 - RNA, 20 nt, Artificial Sequence
  SAMD9 targeting guide sequence portion
ggaaauaaucauauuggcau

SEQ ID NO: 10485 - RNA, 20 nt, Artificial Sequence
  SAMD9 targeting guide sequence portion
guaauuuugcauuuuaaucu

SEQ ID NO: 10486 - RNA, 20 nt, Artificial Sequence
  SAMD9 targeting guide sequence portion
guucucugaaugccaauaug

SEQ ID NO: 10487 - RNA, 20 nt, Artificial Sequence
  SAMD9 targeting guide sequence portion
uaaucuggaaauaaucauau

SEQ ID NO: 10488 - RNA, 20 nt, Artificial Sequence
  SAMD9 targeting guide sequence portion
uaauuuugcauuuuaaucug

SEQ ID NO: 10489 - RNA, 20 nt, Artificial Sequence
  SAMD9 targeting guide sequence portion
uauuuccagauuaaaaugca

SEQ ID NO: 10490 - RNA, 20 nt, Artificial Sequence
  SAMD9 targeting guide sequence portion
ucucugaaugccaauaugau

SEQ ID NO: 10491 - RNA, 20 nt, Artificial Sequence
  SAMD9 targeting guide sequence portion
ucugaaugccaauaugauua

SEQ ID NO: 10492 - RNA, 20 nt, Artificial Sequence
  SAMD9 targeting guide sequence portion
ucuggaaauaaucauauugg

SEQ ID NO: 10493 - RNA, 20 nt, Artificial Sequence
  SAMD9 targeting guide sequence portion
ugaaugccaauaugauuauu

SEQ ID NO: 10494 - RNA, 20 nt, Artificial Sequence
  SAMD9 targeting guide sequence portion
ugcauuuuaaucuggaaaua

SEQ ID NO: 10495 - RNA, 20 nt, Artificial Sequence
  SAMD9 targeting guide sequence portion
ugccaauaugauuauuucca

SEQ ID NO: 10496 - RNA, 20 nt, Artificial Sequence
  SAMD9 targeting guide sequence portion
uggaaauaaucauauuggca

SEQ ID NO: 10497 - RNA, 20 nt, Artificial Sequence
  SAMD9 targeting guide sequence portion
uguaauuuugcauuuuaauc

SEQ ID NO: 10498 - RNA, 20 nt, Artificial Sequence
  SAMD9 targeting guide sequence portion
uuaaucuggaaauaaucaua

SEQ ID NO: 10499 - RNA, 20 nt, Artificial Sequence
  SAMD9 targeting guide sequence portion
uuauuuccagauuaaaaugc

SEQ ID NO: 10500 - RNA, 20 nt, Artificial Sequence
  SAMD9 targeting guide sequence portion
uucucugaaugccaauauga

SEQ ID NO: 10501 - RNA, 20 nt, Artificial Sequence
  SAMD9 targeting guide sequence portion
uugcauuuuaaucuggaaau

SEQ ID NO: 10502 - RNA, 20 nt, Artificial Sequence
  SAMD9 targeting guide sequence portion
uuuaaucuggaaauaaucau

SEQ ID NO: 10503 - RNA, 20 nt, Artificial Sequence
  SAMD9 targeting guide sequence portion
uuuccagauuaaaaugcaaa

SEQ ID NO: 10504 - RNA, 20 nt, Artificial Sequence
  SAMD9 targeting guide sequence portion
uuugcauuuuaaucuggaaa

SEQ ID NO: 10505 - RNA, 20 nt, Artificial Sequence
  SAMD9 targeting guide sequence portion
uuuuaaucuggaaauaauca

SEQ ID NO: 10506 - RNA, 20 nt, Artificial Sequence
  SAMD9 targeting guide sequence portion
uuuugcauuuuaaucuggaa

SEQ ID NO: 10507 - RNA, 21 nt, Artificial Sequence
  SAMD9 targeting guide sequence portion
aaauaaucauauuggcauuca

SEQ ID NO: 10508 - RNA, 21 nt, Artificial Sequence
  SAMD9 targeting guide sequence portion
aauaaucauauuggcauucag

SEQ ID NO: 10509 - RNA, 21 nt, Artificial Sequence
  SAMD9 targeting guide sequence portion
aaucuggaaauaaucauauug

SEQ ID NO: 10510 - RNA, 21 nt, Artificial Sequence
  SAMD9 targeting guide sequence portion
aaugccaauaugauuauuucc

SEQ ID NO: 10511 - RNA, 21 nt, Artificial Sequence
  SAMD9 targeting guide sequence portion
aauuuugcauuuuaaucugga

SEQ ID NO: 10512 - RNA, 21 nt, Artificial Sequence
  SAMD9 targeting guide sequence portion
aguucucugaaugccaauaug

SEQ ID NO: 10513 - RNA, 21 nt, Artificial Sequence
  SAMD9 targeting guide sequence portion
auaaucauauuggcauucaga

SEQ ID NO: 10514 - RNA, 21 nt, Artificial Sequence
  SAMD9 targeting guide sequence portion
aucuggaaauaaucauauugg

SEQ ID NO: 10515 - RNA, 21 nt, Artificial Sequence
  SAMD9 targeting guide sequence portion
augccaauaugauuauuucca

SEQ ID NO: 10516 - RNA, 21 nt, Artificial Sequence
  SAMD9 targeting guide sequence portion
auuauuuccagauuaaaaugc

SEQ ID NO: 10517 - RNA, 21 nt, Artificial Sequence
  SAMD9 targeting guide sequence portion
auuuccagauuaaaaugcaaa

SEQ ID NO: 10518 - RNA, 21 nt, Artificial Sequence
  SAMD9 targeting guide sequence portion
auuuugcauuuuaaucuggaa

SEQ ID NO: 10519 - RNA, 21 nt, Artificial Sequence
  SAMD9 targeting guide sequence portion
caauaugauuauuuccagauu

SEQ ID NO: 10520 - RNA, 21 nt, Artificial Sequence
  SAMD9 targeting guide sequence portion
caguucucugaaugccaauau

SEQ ID NO: 10521 - RNA, 21 nt, Artificial Sequence
  SAMD9 targeting guide sequence portion
cauuuuaaucuggaaauaauc

SEQ ID NO: 10522 - RNA, 21 nt, Artificial Sequence
  SAMD9 targeting guide sequence portion
ccaauaugauuauuuccagau

SEQ ID NO: 10523 - RNA, 21 nt, Artificial Sequence
  SAMD9 targeting guide sequence portion
cucugaaugccaauaugauua

SEQ ID NO: 10524 - RNA, 21 nt, Artificial Sequence
  SAMD9 targeting guide sequence portion
cugaaugccaauaugauuauu

SEQ ID NO: 10525 - RNA, 21 nt, Artificial Sequence
  SAMD9 targeting guide sequence portion
cuggaaauaaucauauuggca

SEQ ID NO: 10526 - RNA, 21 nt, Artificial Sequence
  SAMD9 targeting guide sequence portion
gaaauaaucauauuggcauuc

SEQ ID NO: 10527 - RNA, 21 nt, Artificial Sequence
  SAMD9 targeting guide sequence portion
gaaugccaauaugauuauuuc

SEQ ID NO: 10528 - RNA, 21 nt, Artificial Sequence
  SAMD9 targeting guide sequence portion
gcauuuuaaucuggaaauaau

SEQ ID NO: 10529 - RNA, 21 nt, Artificial Sequence
  SAMD9 targeting guide sequence portion
gccaauaugauuauuuccaga

SEQ ID NO: 10530 - RNA, 21 nt, Artificial Sequence
  SAMD9 targeting guide sequence portion
ggaaauaaucauauuggcauu

SEQ ID NO: 10531 - RNA, 21 nt, Artificial Sequence
  SAMD9 targeting guide sequence portion
guaauuuugcauuuuaaucug

SEQ ID NO: 10532 - RNA, 21 nt, Artificial Sequence
  SAMD9 targeting guide sequence portion
guucucugaaugccaauauga

SEQ ID NO: 10533 - RNA, 21 nt, Artificial Sequence
  SAMD9 targeting guide sequence portion
uaauuuugcauuuuaaucugg

SEQ ID NO: 10534 - RNA, 21 nt, Artificial Sequence
  SAMD9 targeting guide sequence portion
uauuuccagauuaaaaugcaa

SEQ ID NO: 10535 - RNA, 21 nt, Artificial Sequence
  SAMD9 targeting guide sequence portion
ucucugaaugccaauaugauu

SEQ ID NO: 10536 - RNA, 21 nt, Artificial Sequence
  SAMD9 targeting guide sequence portion
ucugaaugccaauaugauuau

SEQ ID NO: 10537 - RNA, 21 nt, Artificial Sequence
  SAMD9 targeting guide sequence portion
ucuggaaauaaucauauuggc

SEQ ID NO: 10538 - RNA, 21 nt, Artificial Sequence
  SAMD9 targeting guide sequence portion
ugaaugccaauaugauuauuu

SEQ ID NO: 10539 - RNA, 21 nt, Artificial Sequence
  SAMD9 targeting guide sequence portion
ugcauuuuaaucuggaaauaa

SEQ ID NO: 10540 - RNA, 21 nt, Artificial Sequence
  SAMD9 targeting guide sequence portion
ugccaauaugauuauuuccag

SEQ ID NO: 10541 - RNA, 21 nt, Artificial Sequence
  SAMD9 targeting guide sequence portion
uggaaauaaucauauuggcau

SEQ ID NO: 10542 - RNA, 21 nt, Artificial Sequence
  SAMD9 targeting guide sequence portion
uuauuuccagauuaaaaugca

SEQ ID NO: 10543 - RNA, 21 nt, Artificial Sequence
  SAMD9 targeting guide sequence portion
uucucugaaugccaauaugau

SEQ ID NO: 10544 - RNA, 21 nt, Artificial Sequence
  SAMD9 targeting guide sequence portion
uugcauuuuaaucuggaaaua

SEQ ID NO: 10545 - RNA, 21 nt, Artificial Sequence
  SAMD9 targeting guide sequence portion
uuuccagauuaaaaugcaaaa

SEQ ID NO: 10546 - RNA, 21 nt, Artificial Sequence
  SAMD9 targeting guide sequence portion
uuugcauuuuaaucuggaaau

SEQ ID NO: 10547 - RNA, 21 nt, Artificial Sequence
  SAMD9 targeting guide sequence portion
uuuugcauuuuaaucuggaaa

SEQ ID NO: 10548 - RNA, 22 nt, Artificial Sequence
  SAMD9 targeting guide sequence portion
aaauaaucauauuggcauucag

SEQ ID NO: 10549 - RNA, 22 nt, Artificial Sequence
  SAMD9 targeting guide sequence portion
aauaaucauauuggcauucaga

SEQ ID NO: 10550 - RNA, 22 nt, Artificial Sequence
  SAMD9 targeting guide sequence portion
aaucuggaaauaaucauauugg

SEQ ID NO: 10551 - RNA, 22 nt, Artificial Sequence
  SAMD9 targeting guide sequence portion
aaugccaauaugauuauuucca

SEQ ID NO: 10552 - RNA, 22 nt, Artificial Sequence
  SAMD9 targeting guide sequence portion
aauuuugcauuuuaaucuggaa

SEQ ID NO: 10553 - RNA, 22 nt, Artificial Sequence
  SAMD9 targeting guide sequence portion
acaguucucugaaugccaauau

SEQ ID NO: 10554 - RNA, 22 nt, Artificial Sequence
  SAMD9 targeting guide sequence portion
aguucucugaaugccaauauga

SEQ ID NO: 10555 - RNA, 22 nt, Artificial Sequence
  SAMD9 targeting guide sequence portion
auaaucauauuggcauucagag

SEQ ID NO: 10556 - RNA, 22 nt, Artificial Sequence
  SAMD9 targeting guide sequence portion
aucuggaaauaaucauauuggc

SEQ ID NO: 10557 - RNA, 22 nt, Artificial Sequence
  SAMD9 targeting guide sequence portion
augccaauaugauuauuuccag

SEQ ID NO: 10558 - RNA, 22 nt, Artificial Sequence
  SAMD9 targeting guide sequence portion
auuauuuccagauuaaaaugca

SEQ ID NO: 10559 - RNA, 22 nt, Artificial Sequence
  SAMD9 targeting guide sequence portion
auuuccagauuaaaaugcaaaa

SEQ ID NO: 10560 - RNA, 22 nt, Artificial Sequence
  SAMD9 targeting guide sequence portion
auuuugcauuuuaaucuggaaa

SEQ ID NO: 10561 - RNA, 22 nt, Artificial Sequence
  SAMD9 targeting guide sequence portion
caguucucugaaugccaauaug

SEQ ID NO: 10562 - RNA, 22 nt, Artificial Sequence
  SAMD9 targeting guide sequence portion
cauuuuaaucuggaaauaauca

SEQ ID NO: 10563 - RNA, 22 nt, Artificial Sequence
  SAMD9 targeting guide sequence portion
ccaauaugauuauuuccagauu

SEQ ID NO: 10564 - RNA, 22 nt, Artificial Sequence
  SAMD9 targeting guide sequence portion
cucugaaugccaauaugauuau

SEQ ID NO: 10565 - RNA, 22 nt, Artificial Sequence
  SAMD9 targeting guide sequence portion
cugaaugccaauaugauuauuu

SEQ ID NO: 10566 - RNA, 22 nt, Artificial Sequence
  SAMD9 targeting guide sequence portion
cuggaaauaaucauauuggcau

SEQ ID NO: 10567 - RNA, 22 nt, Artificial Sequence
  SAMD9 targeting guide sequence portion
gaaauaaucauauuggcauuca

SEQ ID NO: 10568 - RNA, 22 nt, Artificial Sequence
  SAMD9 targeting guide sequence portion
gaaugccaauaugauuauuucc

SEQ ID NO: 10569 - RNA, 22 nt, Artificial Sequence
  SAMD9 targeting guide sequence portion
gauuauuuccagauuaaaaugc

SEQ ID NO: 10570 - RNA, 22 nt, Artificial Sequence
  SAMD9 targeting guide sequence portion
gcauuuuaaucuggaaauaauc

SEQ ID NO: 10571 - RNA, 22 nt, Artificial Sequence
  SAMD9 targeting guide sequence portion
gccaauaugauuauuuccagau

SEQ ID NO: 10572 - RNA, 22 nt, Artificial Sequence
  SAMD9 targeting guide sequence portion
ggaaauaaucauauuggcauuc

SEQ ID NO: 10573 - RNA, 22 nt, Artificial Sequence
  SAMD9 targeting guide sequence portion
guaauuuugcauuuuaaucugg

SEQ ID NO: 10574 - RNA, 22 nt, Artificial Sequence
  SAMD9 targeting guide sequence portion
guucucugaaugccaauaugau

SEQ ID NO: 10575 - RNA, 22 nt, Artificial Sequence
  SAMD9 targeting guide sequence portion
guuguaauuuugcauuuuaauc

SEQ ID NO: 10576 - RNA, 22 nt, Artificial Sequence
  SAMD9 targeting guide sequence portion
uaaucuggaaauaaucauauug

SEQ ID NO: 10577 - RNA, 22 nt, Artificial Sequence
  SAMD9 targeting guide sequence portion
uaauuuugcauuuuaaucugga

SEQ ID NO: 10578 - RNA, 22 nt, Artificial Sequence
  SAMD9 targeting guide sequence portion
uauuuccagauuaaaaugcaaa

SEQ ID NO: 10579 - RNA, 22 nt, Artificial Sequence
  SAMD9 targeting guide sequence portion
ucucugaaugccaauaugauua

SEQ ID NO: 10580 - RNA, 22 nt, Artificial Sequence
  SAMD9 targeting guide sequence portion
ucugaaugccaauaugauuauu

SEQ ID NO: 10581 - RNA, 22 nt, Artificial Sequence
  SAMD9 targeting guide sequence portion
ucuggaaauaaucauauuggca

SEQ ID NO: 10582 - RNA, 22 nt, Artificial Sequence
  SAMD9 targeting guide sequence portion
ugaaugccaauaugauuauuuc

SEQ ID NO: 10583 - RNA, 22 nt, Artificial Sequence
  SAMD9 targeting guide sequence portion
ugcauuuuaaucuggaaauaau

SEQ ID NO: 10584 - RNA, 22 nt, Artificial Sequence
  SAMD9 targeting guide sequence portion
ugccaauaugauuauuuccaga

SEQ ID NO: 10585 - RNA, 22 nt, Artificial Sequence
  SAMD9 targeting guide sequence portion
uggaaauaaucauauuggcauu

SEQ ID NO: 10586 - RNA, 22 nt, Artificial Sequence
  SAMD9 targeting guide sequence portion
uguaauuuugcauuuuaaucug

SEQ ID NO: 10587 - RNA, 22 nt, Artificial Sequence
  SAMD9 targeting guide sequence portion
uuauuuccagauuaaaaugcaa

SEQ ID NO: 10588 - RNA, 22 nt, Artificial Sequence
  SAMD9 targeting guide sequence portion
uucucugaaugccaauaugauu

SEQ ID NO: 10589 - RNA, 22 nt, Artificial Sequence
  SAMD9 targeting guide sequence portion
uugcauuuuaaucuggaaauaa

SEQ ID NO: 10590 - RNA, 22 nt, Artificial Sequence
  SAMD9 targeting guide sequence portion
uuuccagauuaaaaugcaaaau

SEQ ID NO: 10591 - RNA, 22 nt, Artificial Sequence
  SAMD9 targeting guide sequence portion
uuugcauuuuaaucuggaaaua

SEQ ID NO: 10592 - RNA, 22 nt, Artificial Sequence
  SAMD9 targeting guide sequence portion
uuuugcauuuuaaucuggaaau

SEQ ID NO: 10593 - RNA, 20 nt, Artificial Sequence
  SAMD9 targeting guide sequence portion
aaguaaucauauuggcauuc

SEQ ID NO: 10594 - RNA, 20 nt, Artificial Sequence
  SAMD9 targeting guide sequence portion
aauaugauuacuuccagauu

SEQ ID NO: 10595 - RNA, 20 nt, Artificial Sequence
  SAMD9 targeting guide sequence portion
aaucuggaaguaaucauauu

SEQ ID NO: 10596 - RNA, 20 nt, Artificial Sequence
  SAMD9 targeting guide sequence portion
aaugccaauaugauuacuuc

SEQ ID NO: 10597 - RNA, 20 nt, Artificial Sequence
  SAMD9 targeting guide sequence portion
acuuccagauuaaaaugcaa

SEQ ID NO: 10598 - RNA, 20 nt, Artificial Sequence
  SAMD9 targeting guide sequence portion
aguaaucauauuggcauuca

SEQ ID NO: 10599 - RNA, 20 nt, Artificial Sequence
  SAMD9 targeting guide sequence portion
auaugauuacuuccagauua

SEQ ID NO: 10600 - RNA, 20 nt, Artificial Sequence
  SAMD9 targeting guide sequence portion
aucuggaaguaaucauauug

SEQ ID NO: 10601 - RNA, 20 nt, Artificial Sequence
  SAMD9 targeting guide sequence portion
augauuacuuccagauuaaa

SEQ ID NO: 10602 - RNA, 20 nt, Artificial Sequence
  SAMD9 targeting guide sequence portion
augccaauaugauuacuucc

SEQ ID NO: 10603 - RNA, 20 nt, Artificial Sequence
  SAMD9 targeting guide sequence portion
auuacuuccagauuaaaaug

SEQ ID NO: 10604 - RNA, 20 nt, Artificial Sequence
  SAMD9 targeting guide sequence portion
auuuuaaucuggaaguaauc

SEQ ID NO: 10605 - RNA, 20 nt, Artificial Sequence
  SAMD9 targeting guide sequence portion
caauaugauuacuuccagau

SEQ ID NO: 10606 - RNA, 20 nt, Artificial Sequence
  SAMD9 targeting guide sequence portion
cauuuuaaucuggaaguaau

SEQ ID NO: 10607 - RNA, 20 nt, Artificial Sequence
  SAMD9 targeting guide sequence portion
ccaauaugauuacuuccaga

SEQ ID NO: 10608 - RNA, 20 nt, Artificial Sequence
  SAMD9 targeting guide sequence portion
cugaaugccaauaugauuac

SEQ ID NO: 10609 - RNA, 20 nt, Artificial Sequence
  SAMD9 targeting guide sequence portion
cuggaaguaaucauauuggc

SEQ ID NO: 10610 - RNA, 20 nt, Artificial Sequence
  SAMD9 targeting guide sequence portion
cuuccagauuaaaaugcaaa

SEQ ID NO: 10611 - RNA, 20 nt, Artificial Sequence
  SAMD9 targeting guide sequence portion
gaaguaaucauauuggcauu

SEQ ID NO: 10612 - RNA, 20 nt, Artificial Sequence
  SAMD9 targeting guide sequence portion
gaaugccaauaugauuacuu

SEQ ID NO: 10613 - RNA, 20 nt, Artificial Sequence
  SAMD9 targeting guide sequence portion
gauuacuuccagauuaaaau

SEQ ID NO: 10614 - RNA, 20 nt, Artificial Sequence
  SAMD9 targeting guide sequence portion
gcauuuuaaucuggaaguaa

SEQ ID NO: 10615 - RNA, 20 nt, Artificial Sequence
  SAMD9 targeting guide sequence portion
gccaauaugauuacuuccag

SEQ ID NO: 10616 - RNA, 20 nt, Artificial Sequence
  SAMD9 targeting guide sequence portion
ggaaguaaucauauuggcau

SEQ ID NO: 10617 - RNA, 20 nt, Artificial Sequence
  SAMD9 targeting guide sequence portion
guaaucauauuggcauucag

SEQ ID NO: 10618 - RNA, 20 nt, Artificial Sequence
  SAMD9 targeting guide sequence portion
uaaucuggaaguaaucauau

SEQ ID NO: 10619 - RNA, 20 nt, Artificial Sequence
  SAMD9 targeting guide sequence portion
uacuuccagauuaaaaugca

SEQ ID NO: 10620 - RNA, 20 nt, Artificial Sequence
  SAMD9 targeting guide sequence portion
uaugauuacuuccagauuaa

SEQ ID NO: 10621 - RNA, 20 nt, Artificial Sequence
  SAMD9 targeting guide sequence portion
ucuggaaguaaucauauugg

SEQ ID NO: 10622 - RNA, 20 nt, Artificial Sequence
  SAMD9 targeting guide sequence portion
ugaaugccaauaugauuacu

SEQ ID NO: 10623 - RNA, 20 nt, Artificial Sequence
  SAMD9 targeting guide sequence portion
ugauuacuuccagauuaaaa

SEQ ID NO: 10624 - RNA, 20 nt, Artificial Sequence
  SAMD9 targeting guide sequence portion
ugcauuuuaaucuggaagua

SEQ ID NO: 10625 - RNA, 20 nt, Artificial Sequence
  SAMD9 targeting guide sequence portion
ugccaauaugauuacuucca

SEQ ID NO: 10626 - RNA, 20 nt, Artificial Sequence
  SAMD9 targeting guide sequence portion
uggaaguaaucauauuggca

SEQ ID NO: 10627 - RNA, 20 nt, Artificial Sequence
  SAMD9 targeting guide sequence portion
uuaaucuggaaguaaucaua

SEQ ID NO: 10628 - RNA, 20 nt, Artificial Sequence
  SAMD9 targeting guide sequence portion
uuacuuccagauuaaaaugc

SEQ ID NO: 10629 - RNA, 20 nt, Artificial Sequence
  SAMD9 targeting guide sequence portion
uugcauuuuaaucuggaagu

SEQ ID NO: 10630 - RNA, 20 nt, Artificial Sequence
  SAMD9 targeting guide sequence portion
uuuaaucuggaaguaaucau

SEQ ID NO: 10631 - RNA, 20 nt, Artificial Sequence
  SAMD9 targeting guide sequence portion
uuugcauuuuaaucuggaag

SEQ ID NO: 10632 - RNA, 20 nt, Artificial Sequence
  SAMD9 targeting guide sequence portion
uuuuaaucuggaaguaauca

SEQ ID NO: 10633 - RNA, 21 nt, Artificial Sequence
  SAMD9 targeting guide sequence portion
aaguaaucauauuggcauuca

SEQ ID NO: 10634 - RNA, 21 nt, Artificial Sequence
  SAMD9 targeting guide sequence portion
aauaugauuacuuccagauua

SEQ ID NO: 10635 - RNA, 21 nt, Artificial Sequence
  SAMD9 targeting guide sequence portion
aaucuggaaguaaucauauug

SEQ ID NO: 10636 - RNA, 21 nt, Artificial Sequence
  SAMD9 targeting guide sequence portion
aaugccaauaugauuacuucc

SEQ ID NO: 10637 - RNA, 21 nt, Artificial Sequence
  SAMD9 targeting guide sequence portion
acuuccagauuaaaaugcaaa

SEQ ID NO: 10638 - RNA, 21 nt, Artificial Sequence
  SAMD9 targeting guide sequence portion
aguaaucauauuggcauucag

SEQ ID NO: 10639 - RNA, 21 nt, Artificial Sequence
  SAMD9 targeting guide sequence portion
auaugauuacuuccagauuaa

SEQ ID NO: 10640 - RNA, 21 nt, Artificial Sequence
  SAMD9 targeting guide sequence portion
aucuggaaguaaucauauugg

SEQ ID NO: 10641 - RNA, 21 nt, Artificial Sequence
  SAMD9 targeting guide sequence portion
augauuacuuccagauuaaaa

SEQ ID NO: 10642 - RNA, 21 nt, Artificial Sequence
  SAMD9 targeting guide sequence portion
augccaauaugauuacuucca

SEQ ID NO: 10643 - RNA, 21 nt, Artificial Sequence
  SAMD9 targeting guide sequence portion
auuacuuccagauuaaaaugc

SEQ ID NO: 10644 - RNA, 21 nt, Artificial Sequence
  SAMD9 targeting guide sequence portion
auuuuaaucuggaaguaauca

SEQ ID NO: 10645 - RNA, 21 nt, Artificial Sequence
  SAMD9 targeting guide sequence portion
caauaugauuacuuccagauu

SEQ ID NO: 10646 - RNA, 21 nt, Artificial Sequence
  SAMD9 targeting guide sequence portion
cauuuuaaucuggaaguaauc

SEQ ID NO: 10647 - RNA, 21 nt, Artificial Sequence
  SAMD9 targeting guide sequence portion
ccaauaugauuacuuccagau

SEQ ID NO: 10648 - RNA, 21 nt, Artificial Sequence
  SAMD9 targeting guide sequence portion
cugaaugccaauaugauuacu

SEQ ID NO: 10649 - RNA, 21 nt, Artificial Sequence
  SAMD9 targeting guide sequence portion
cuggaaguaaucauauuggca

SEQ ID NO: 10650 - RNA, 21 nt, Artificial Sequence
  SAMD9 targeting guide sequence portion
cuuccagauuaaaaugcaaaa

SEQ ID NO: 10651 - RNA, 21 nt, Artificial Sequence
  SAMD9 targeting guide sequence portion
gaaguaaucauauuggcauuc

SEQ ID NO: 10652 - RNA, 21 nt, Artificial Sequence
  SAMD9 targeting guide sequence portion
gaaugccaauaugauuacuuc

SEQ ID NO: 10653 - RNA, 21 nt, Artificial Sequence
  SAMD9 targeting guide sequence portion
gauuacuuccagauuaaaaug

SEQ ID NO: 10654 - RNA, 21 nt, Artificial Sequence
  SAMD9 targeting guide sequence portion
gcauuuuaaucuggaaguaau

SEQ ID NO: 10655 - RNA, 21 nt, Artificial Sequence
  SAMD9 targeting guide sequence portion
gccaauaugauuacuuccaga

SEQ ID NO: 10656 - RNA, 21 nt, Artificial Sequence
  SAMD9 targeting guide sequence portion
ggaaguaaucauauuggcauu

SEQ ID NO: 10657 - RNA, 21 nt, Artificial Sequence
  SAMD9 targeting guide sequence portion
guaaucauauuggcauucaga

SEQ ID NO: 10658 - RNA, 21 nt, Artificial Sequence
  SAMD9 targeting guide sequence portion
uaaucuggaaguaaucauauu

SEQ ID NO: 10659 - RNA, 21 nt, Artificial Sequence
  SAMD9 targeting guide sequence portion
uacuuccagauuaaaaugcaa

SEQ ID NO: 10660 - RNA, 21 nt, Artificial Sequence
  SAMD9 targeting guide sequence portion
uaugauuacuuccagauuaaa

SEQ ID NO: 10661 - RNA, 21 nt, Artificial Sequence
  SAMD9 targeting guide sequence portion
ucugaaugccaauaugauuac

SEQ ID NO: 10662 - RNA, 21 nt, Artificial Sequence
  SAMD9 targeting guide sequence portion
ucuggaaguaaucauauuggc

SEQ ID NO: 10663 - RNA, 21 nt, Artificial Sequence
  SAMD9 targeting guide sequence portion
ugaaugccaauaugauuacuu

SEQ ID NO: 10664 - RNA, 21 nt, Artificial Sequence
  SAMD9 targeting guide sequence portion
ugauuacuuccagauuaaaau

SEQ ID NO: 10665 - RNA, 21 nt, Artificial Sequence
  SAMD9 targeting guide sequence portion
ugcauuuuaaucuggaaguaa

SEQ ID NO: 10666 - RNA, 21 nt, Artificial Sequence
  SAMD9 targeting guide sequence portion
ugccaauaugauuacuuccag

SEQ ID NO: 10667 - RNA, 21 nt, Artificial Sequence
  SAMD9 targeting guide sequence portion
uggaaguaaucauauuggcau

SEQ ID NO: 10668 - RNA, 21 nt, Artificial Sequence
  SAMD9 targeting guide sequence portion
uuaaucuggaaguaaucauau

SEQ ID NO: 10669 - RNA, 21 nt, Artificial Sequence
  SAMD9 targeting guide sequence portion
uuacuuccagauuaaaaugca

SEQ ID NO: 10670 - RNA, 21 nt, Artificial Sequence
  SAMD9 targeting guide sequence portion
uugcauuuuaaucuggaagua

SEQ ID NO: 10671 - RNA, 21 nt, Artificial Sequence
  SAMD9 targeting guide sequence portion
uuuaaucuggaaguaaucaua

SEQ ID NO: 10672 - RNA, 21 nt, Artificial Sequence
  SAMD9 targeting guide sequence portion
uuugcauuuuaaucuggaagu

SEQ ID NO: 10673 - RNA, 21 nt, Artificial Sequence
  SAMD9 targeting guide sequence portion
uuuuaaucuggaaguaaucau

SEQ ID NO: 10674 - RNA, 21 nt, Artificial Sequence
  SAMD9 targeting guide sequence portion
uuuugcauuuuaaucuggaag

SEQ ID NO: 10675 - RNA, 22 nt, Artificial Sequence
  SAMD9 targeting guide sequence portion
aaguaaucauauuggcauucag

SEQ ID NO: 10676 - RNA, 22 nt, Artificial Sequence
  SAMD9 targeting guide sequence portion
aauaugauuacuuccagauuaa

SEQ ID NO: 10677 - RNA, 22 nt, Artificial Sequence
  SAMD9 targeting guide sequence portion
aaucuggaaguaaucauauugg

SEQ ID NO: 10678 - RNA, 22 nt, Artificial Sequence
  SAMD9 targeting guide sequence portion
aaugccaauaugauuacuucca

SEQ ID NO: 10679 - RNA, 22 nt, Artificial Sequence
  SAMD9 targeting guide sequence portion
acuuccagauuaaaaugcaaaa

SEQ ID NO: 10680 - RNA, 22 nt, Artificial Sequence
  SAMD9 targeting guide sequence portion
aguaaucauauuggcauucaga

SEQ ID NO: 10681 - RNA, 22 nt, Artificial Sequence
  SAMD9 targeting guide sequence portion
auaugauuacuuccagauuaaa

SEQ ID NO: 10682 - RNA, 22 nt, Artificial Sequence
  SAMD9 targeting guide sequence portion
aucuggaaguaaucauauuggc

SEQ ID NO: 10683 - RNA, 22 nt, Artificial Sequence
  SAMD9 targeting guide sequence portion
augauuacuuccagauuaaaau

SEQ ID NO: 10684 - RNA, 22 nt, Artificial Sequence
  SAMD9 targeting guide sequence portion
augccaauaugauuacuuccag

SEQ ID NO: 10685 - RNA, 22 nt, Artificial Sequence
  SAMD9 targeting guide sequence portion
auuacuuccagauuaaaaugca

SEQ ID NO: 10686 - RNA, 22 nt, Artificial Sequence
  SAMD9 targeting guide sequence portion
auuuuaaucuggaaguaaucau

SEQ ID NO: 10687 - RNA, 22 nt, Artificial Sequence
  SAMD9 targeting guide sequence portion
auuuugcauuuuaaucuggaag

SEQ ID NO: 10688 - RNA, 22 nt, Artificial Sequence
  SAMD9 targeting guide sequence portion
caauaugauuacuuccagauua

SEQ ID NO: 10689 - RNA, 22 nt, Artificial Sequence
  SAMD9 targeting guide sequence portion
cauuuuaaucuggaaguaauca

SEQ ID NO: 10690 - RNA, 22 nt, Artificial Sequence
  SAMD9 targeting guide sequence portion
ccaauaugauuacuuccagauu

SEQ ID NO: 10691 - RNA, 22 nt, Artificial Sequence
  SAMD9 targeting guide sequence portion
cucugaaugccaauaugauuac

SEQ ID NO: 10692 - RNA, 22 nt, Artificial Sequence
  SAMD9 targeting guide sequence portion
cugaaugccaauaugauuacuu

SEQ ID NO: 10693 - RNA, 22 nt, Artificial Sequence
  SAMD9 targeting guide sequence portion
cuggaaguaaucauauuggcau

SEQ ID NO: 10694 - RNA, 22 nt, Artificial Sequence
  SAMD9 targeting guide sequence portion
cuuccagauuaaaaugcaaaau

SEQ ID NO: 10695 - RNA, 22 nt, Artificial Sequence
  SAMD9 targeting guide sequence portion
gaaguaaucauauuggcauuca

SEQ ID NO: 10696 - RNA, 22 nt, Artificial Sequence
  SAMD9 targeting guide sequence portion
gaaugccaauaugauuacuucc

SEQ ID NO: 10697 - RNA, 22 nt, Artificial Sequence
  SAMD9 targeting guide sequence portion
gauuacuuccagauuaaaaugc

SEQ ID NO: 10698 - RNA, 22 nt, Artificial Sequence
  SAMD9 targeting guide sequence portion
gcauuuuaaucuggaaguaauc

SEQ ID NO: 10699 - RNA, 22 nt, Artificial Sequence
  SAMD9 targeting guide sequence portion
gccaauaugauuacuuccagau

SEQ ID NO: 10700 - RNA, 22 nt, Artificial Sequence
  SAMD9 targeting guide sequence portion
ggaaguaaucauauuggcauuc

SEQ ID NO: 10701 - RNA, 22 nt, Artificial Sequence
  SAMD9 targeting guide sequence portion
guaaucauauuggcauucagag

SEQ ID NO: 10702 - RNA, 22 nt, Artificial Sequence
  SAMD9 targeting guide sequence portion
uaaucuggaaguaaucauauug

SEQ ID NO: 10703 - RNA, 22 nt, Artificial Sequence
  SAMD9 targeting guide sequence portion
uacuuccagauuaaaaugcaaa

SEQ ID NO: 10704 - RNA, 22 nt, Artificial Sequence
  SAMD9 targeting guide sequence portion
uaugauuacuuccagauuaaaa

SEQ ID NO: 10705 - RNA, 22 nt, Artificial Sequence
  SAMD9 targeting guide sequence portion
ucugaaugccaauaugauuacu

SEQ ID NO: 10706 - RNA, 22 nt, Artificial Sequence
  SAMD9 targeting guide sequence portion
ucuggaaguaaucauauuggca

SEQ ID NO: 10707 - RNA, 22 nt, Artificial Sequence
  SAMD9 targeting guide sequence portion
ugaaugccaauaugauuacuuc

SEQ ID NO: 10708 - RNA, 22 nt, Artificial Sequence
  SAMD9 targeting guide sequence portion
ugauuacuuccagauuaaaaug

SEQ ID NO: 10709 - RNA, 22 nt, Artificial Sequence
  SAMD9 targeting guide sequence portion
ugcauuuuaaucuggaaguaau

SEQ ID NO: 10710 - RNA, 22 nt, Artificial Sequence
  SAMD9 targeting guide sequence portion
ugccaauaugauuacuuccaga

SEQ ID NO: 10711 - RNA, 22 nt, Artificial Sequence
  SAMD9 targeting guide sequence portion
uggaaguaaucauauuggcauu

SEQ ID NO: 10712 - RNA, 22 nt, Artificial Sequence
  SAMD9 targeting guide sequence portion
uuaaucuggaaguaaucauauu

SEQ ID NO: 10713 - RNA, 22 nt, Artificial Sequence
  SAMD9 targeting guide sequence portion
uuacuuccagauuaaaaugcaa

SEQ ID NO: 10714 - RNA, 22 nt, Artificial Sequence
  SAMD9 targeting guide sequence portion
uugcauuuuaaucuggaaguaa

SEQ ID NO: 10715 - RNA, 22 nt, Artificial Sequence
  SAMD9 targeting guide sequence portion
uuuaaucuggaaguaaucauau

SEQ ID NO: 10716 - RNA, 22 nt, Artificial Sequence
  SAMD9 targeting guide sequence portion
uuugcauuuuaaucuggaagua

SEQ ID NO: 10717 - RNA, 22 nt, Artificial Sequence
  SAMD9 targeting guide sequence portion
uuuuaaucuggaaguaaucaua

SEQ ID NO: 10718 - RNA, 22 nt, Artificial Sequence
  SAMD9 targeting guide sequence portion
uuuugcauuuuaaucuggaagu

SEQ ID NO: 10719 - RNA, 20 nt, Artificial Sequence
  SAMD9 targeting guide sequence portion
aaaaguugagcucauagaag

SEQ ID NO: 10720 - RNA, 20 nt, Artificial Sequence
  SAMD9 targeting guide sequence portion
aaaguugagcucauagaaga

SEQ ID NO: 10721 - RNA, 20 nt, Artificial Sequence
  SAMD9 targeting guide sequence portion
aagucacuaaaaguugagcu

SEQ ID NO: 10722 - RNA, 20 nt, Artificial Sequence
  SAMD9 targeting guide sequence portion
aaguugagcucauagaagau

SEQ ID NO: 10723 - RNA, 20 nt, Artificial Sequence
  SAMD9 targeting guide sequence portion
aaucuauuuuaucuucuaug

SEQ ID NO: 10724 - RNA, 20 nt, Artificial Sequence
  SAMD9 targeting guide sequence portion
acuaaaaguugagcucauag

SEQ ID NO: 10725 - RNA, 20 nt, Artificial Sequence
  SAMD9 targeting guide sequence portion
agcucauagaagauaaaaua

SEQ ID NO: 10726 - RNA, 20 nt, Artificial Sequence
  SAMD9 targeting guide sequence portion
agucacuaaaaguugagcuc

SEQ ID NO: 10727 - RNA, 20 nt, Artificial Sequence
  SAMD9 targeting guide sequence portion
aguugagcucauagaagaua

SEQ ID NO: 10728 - RNA, 20 nt, Artificial Sequence
  SAMD9 targeting guide sequence portion
aucuauuuuaucuucuauga

SEQ ID NO: 10729 - RNA, 20 nt, Artificial Sequence
  SAMD9 targeting guide sequence portion
aucuucuaugagcucaacuu

SEQ ID NO: 10730 - RNA, 20 nt, Artificial Sequence
  SAMD9 targeting guide sequence portion
augagcucaacuuuuaguga

SEQ ID NO: 10731 - RNA, 20 nt, Artificial Sequence
  SAMD9 targeting guide sequence portion
auuuuaucuucuaugagcuc

SEQ ID NO: 10732 - RNA, 20 nt, Artificial Sequence
  SAMD9 targeting guide sequence portion
cacuaaaaguugagcucaua

SEQ ID NO: 10733 - RNA, 20 nt, Artificial Sequence
  SAMD9 targeting guide sequence portion
cauagaagauaaaauagauu

SEQ ID NO: 10734 - RNA, 20 nt, Artificial Sequence
  SAMD9 targeting guide sequence portion
cuaaaaguugagcucauaga

SEQ ID NO: 10735 - RNA, 20 nt, Artificial Sequence
  SAMD9 targeting guide sequence portion
cuaagucacuaaaaguugag

SEQ ID NO: 10736 - RNA, 20 nt, Artificial Sequence
  SAMD9 targeting guide sequence portion
cuaugagcucaacuuuuagu

SEQ ID NO: 10737 - RNA, 20 nt, Artificial Sequence
  SAMD9 targeting guide sequence portion
cuauuuuaucuucuaugagc

SEQ ID NO: 10738 - RNA, 20 nt, Artificial Sequence
  SAMD9 targeting guide sequence portion
cucauagaagauaaaauaga

SEQ ID NO: 10739 - RNA, 20 nt, Artificial Sequence
  SAMD9 targeting guide sequence portion
cuucuaugagcucaacuuuu

SEQ ID NO: 10740 - RNA, 20 nt, Artificial Sequence
  SAMD9 targeting guide sequence portion
gagcucauagaagauaaaau

SEQ ID NO: 10741 - RNA, 20 nt, Artificial Sequence
  SAMD9 targeting guide sequence portion
gcucauagaagauaaaauag

SEQ ID NO: 10742 - RNA, 20 nt, Artificial Sequence
  SAMD9 targeting guide sequence portion
guauaaucuauuuuaucuuc

SEQ ID NO: 10743 - RNA, 20 nt, Artificial Sequence
  SAMD9 targeting guide sequence portion
gucacuaaaaguugagcuca

SEQ ID NO: 10744 - RNA, 20 nt, Artificial Sequence
  SAMD9 targeting guide sequence portion
guugagcucauagaagauaa

SEQ ID NO: 10745 - RNA, 20 nt, Artificial Sequence
  SAMD9 targeting guide sequence portion
uaaaaguugagcucauagaa

SEQ ID NO: 10746 - RNA, 20 nt, Artificial Sequence
  SAMD9 targeting guide sequence portion
uaagucacuaaaaguugagc

SEQ ID NO: 10747 - RNA, 20 nt, Artificial Sequence
  SAMD9 targeting guide sequence portion
uaucuucuaugagcucaacu

SEQ ID NO: 10748 - RNA, 20 nt, Artificial Sequence
  SAMD9 targeting guide sequence portion
uaugagcucaacuuuuagug

SEQ ID NO: 10749 - RNA, 20 nt, Artificial Sequence
  SAMD9 targeting guide sequence portion
uauuuuaucuucuaugagcu

SEQ ID NO: 10750 - RNA, 20 nt, Artificial Sequence
  SAMD9 targeting guide sequence portion
ucacuaaaaguugagcucau

SEQ ID NO: 10751 - RNA, 20 nt, Artificial Sequence
  SAMD9 targeting guide sequence portion
ucauagaagauaaaauagau

SEQ ID NO: 10752 - RNA, 20 nt, Artificial Sequence
  SAMD9 targeting guide sequence portion
ucuaagucacuaaaaguuga

SEQ ID NO: 10753 - RNA, 20 nt, Artificial Sequence
  SAMD9 targeting guide sequence portion
ucuaugagcucaacuuuuag

SEQ ID NO: 10754 - RNA, 20 nt, Artificial Sequence
  SAMD9 targeting guide sequence portion
ucuauuuuaucuucuaugag

SEQ ID NO: 10755 - RNA, 20 nt, Artificial Sequence
  SAMD9 targeting guide sequence portion
ucuucuaugagcucaacuuu

SEQ ID NO: 10756 - RNA, 20 nt, Artificial Sequence
  SAMD9 targeting guide sequence portion
ugagcucauagaagauaaaa

SEQ ID NO: 10757 - RNA, 20 nt, Artificial Sequence
  SAMD9 targeting guide sequence portion
uuaucuucuaugagcucaac

SEQ ID NO: 10758 - RNA, 20 nt, Artificial Sequence
  SAMD9 targeting guide sequence portion
uucuaugagcucaacuuuua

SEQ ID NO: 10759 - RNA, 20 nt, Artificial Sequence
  SAMD9 targeting guide sequence portion
uugagcucauagaagauaaa

SEQ ID NO: 10760 - RNA, 20 nt, Artificial Sequence
  SAMD9 targeting guide sequence portion
uuuaucuucuaugagcucaa

SEQ ID NO: 10761 - RNA, 20 nt, Artificial Sequence
  SAMD9 targeting guide sequence portion
uuuuaucuucuaugagcuca

SEQ ID NO: 10762 - RNA, 21 nt, Artificial Sequence
  SAMD9 targeting guide sequence portion
aaaaguugagcucauagaaga

SEQ ID NO: 10763 - RNA, 21 nt, Artificial Sequence
  SAMD9 targeting guide sequence portion
aaaguugagcucauagaagau

SEQ ID NO: 10764 - RNA, 21 nt, Artificial Sequence
  SAMD9 targeting guide sequence portion
aagucacuaaaaguugagcuc

SEQ ID NO: 10765 - RNA, 21 nt, Artificial Sequence
  SAMD9 targeting guide sequence portion
aaguugagcucauagaagaua

SEQ ID NO: 10766 - RNA, 21 nt, Artificial Sequence
  SAMD9 targeting guide sequence portion
acuaaaaguugagcucauaga

SEQ ID NO: 10767 - RNA, 21 nt, Artificial Sequence
  SAMD9 targeting guide sequence portion
agcucauagaagauaaaauag

SEQ ID NO: 10768 - RNA, 21 nt, Artificial Sequence
  SAMD9 targeting guide sequence portion
agucacuaaaaguugagcuca

SEQ ID NO: 10769 - RNA, 21 nt, Artificial Sequence
  SAMD9 targeting guide sequence portion
aguugagcucauagaagauaa

SEQ ID NO: 10770 - RNA, 21 nt, Artificial Sequence
  SAMD9 targeting guide sequence portion
aucuauuuuaucuucuaugag

SEQ ID NO: 10771 - RNA, 21 nt, Artificial Sequence
  SAMD9 targeting guide sequence portion
aucuucuaugagcucaacuuu

SEQ ID NO: 10772 - RNA, 21 nt, Artificial Sequence
  SAMD9 targeting guide sequence portion
augagcucaacuuuuagugac

SEQ ID NO: 10773 - RNA, 21 nt, Artificial Sequence
  SAMD9 targeting guide sequence portion
auuuuaucuucuaugagcuca

SEQ ID NO: 10774 - RNA, 21 nt, Artificial Sequence
  SAMD9 targeting guide sequence portion
cacuaaaaguugagcucauag

SEQ ID NO: 10775 - RNA, 21 nt, Artificial Sequence
  SAMD9 targeting guide sequence portion
cuaaaaguugagcucauagaa

SEQ ID NO: 10776 - RNA, 21 nt, Artificial Sequence
  SAMD9 targeting guide sequence portion
cuaagucacuaaaaguugagc

SEQ ID NO: 10777 - RNA, 21 nt, Artificial Sequence
  SAMD9 targeting guide sequence portion
cuaugagcucaacuuuuagug

SEQ ID NO: 10778 - RNA, 21 nt, Artificial Sequence
  SAMD9 targeting guide sequence portion
cuauuuuaucuucuaugagcu

SEQ ID NO: 10779 - RNA, 21 nt, Artificial Sequence
  SAMD9 targeting guide sequence portion
cucauagaagauaaaauagau

SEQ ID NO: 10780 - RNA, 21 nt, Artificial Sequence
  SAMD9 targeting guide sequence portion
cuucuaugagcucaacuuuua

SEQ ID NO: 10781 - RNA, 21 nt, Artificial Sequence
  SAMD9 targeting guide sequence portion
gagcucauagaagauaaaaua

SEQ ID NO: 10782 - RNA, 21 nt, Artificial Sequence
  SAMD9 targeting guide sequence portion
gcucauagaagauaaaauaga

SEQ ID NO: 10783 - RNA, 21 nt, Artificial Sequence
  SAMD9 targeting guide sequence portion
gucacuaaaaguugagcucau

SEQ ID NO: 10784 - RNA, 21 nt, Artificial Sequence
  SAMD9 targeting guide sequence portion
guugagcucauagaagauaaa

SEQ ID NO: 10785 - RNA, 21 nt, Artificial Sequence
  SAMD9 targeting guide sequence portion
uaaaaguugagcucauagaag

SEQ ID NO: 10786 - RNA, 21 nt, Artificial Sequence
  SAMD9 targeting guide sequence portion
uaagucacuaaaaguugagcu

SEQ ID NO: 10787 - RNA, 21 nt, Artificial Sequence
  SAMD9 targeting guide sequence portion
uaucuucuaugagcucaacuu

SEQ ID NO: 10788 - RNA, 21 nt, Artificial Sequence
  SAMD9 targeting guide sequence portion
uaugagcucaacuuuuaguga

SEQ ID NO: 10789 - RNA, 21 nt, Artificial Sequence
  SAMD9 targeting guide sequence portion
uauuuuaucuucuaugagcuc

SEQ ID NO: 10790 - RNA, 21 nt, Artificial Sequence
  SAMD9 targeting guide sequence portion
ucacuaaaaguugagcucaua

SEQ ID NO: 10791 - RNA, 21 nt, Artificial Sequence
  SAMD9 targeting guide sequence portion
ucuaagucacuaaaaguugag

SEQ ID NO: 10792 - RNA, 21 nt, Artificial Sequence
  SAMD9 targeting guide sequence portion
ucuaugagcucaacuuuuagu

SEQ ID NO: 10793 - RNA, 21 nt, Artificial Sequence
  SAMD9 targeting guide sequence portion
ucuauuuuaucuucuaugagc

SEQ ID NO: 10794 - RNA, 21 nt, Artificial Sequence
  SAMD9 targeting guide sequence portion
ucuucuaugagcucaacuuuu

SEQ ID NO: 10795 - RNA, 21 nt, Artificial Sequence
  SAMD9 targeting guide sequence portion
ugagcucauagaagauaaaau

SEQ ID NO: 10796 - RNA, 21 nt, Artificial Sequence
  SAMD9 targeting guide sequence portion
uuaucuucuaugagcucaacu

SEQ ID NO: 10797 - RNA, 21 nt, Artificial Sequence
  SAMD9 targeting guide sequence portion
uucuaagucacuaaaaguuga

SEQ ID NO: 10798 - RNA, 21 nt, Artificial Sequence
  SAMD9 targeting guide sequence portion
uucuaugagcucaacuuuuag

SEQ ID NO: 10799 - RNA, 21 nt, Artificial Sequence
  SAMD9 targeting guide sequence portion
uugagcucauagaagauaaaa

SEQ ID NO: 10800 - RNA, 21 nt, Artificial Sequence
  SAMD9 targeting guide sequence portion
uuuaucuucuaugagcucaac

SEQ ID NO: 10801 - RNA, 21 nt, Artificial Sequence
  SAMD9 targeting guide sequence portion
uuuuaucuucuaugagcucaa

SEQ ID NO: 10802 - RNA, 22 nt, Artificial Sequence
  SAMD9 targeting guide sequence portion
aaaaguugagcucauagaagau

SEQ ID NO: 10803 - RNA, 22 nt, Artificial Sequence
  SAMD9 targeting guide sequence portion
aaaguugagcucauagaagaua

SEQ ID NO: 10804 - RNA, 22 nt, Artificial Sequence
  SAMD9 targeting guide sequence portion
aagucacuaaaaguugagcuca

SEQ ID NO: 10805 - RNA, 22 nt, Artificial Sequence
  SAMD9 targeting guide sequence portion
aaguugagcucauagaagauaa

SEQ ID NO: 10806 - RNA, 22 nt, Artificial Sequence
  SAMD9 targeting guide sequence portion
aaucuauuuuaucuucuaugag

SEQ ID NO: 10807 - RNA, 22 nt, Artificial Sequence
  SAMD9 targeting guide sequence portion
acuaaaaguugagcucauagaa

SEQ ID NO: 10808 - RNA, 22 nt, Artificial Sequence
  SAMD9 targeting guide sequence portion
agcucauagaagauaaaauaga

SEQ ID NO: 10809 - RNA, 22 nt, Artificial Sequence
  SAMD9 targeting guide sequence portion
agucacuaaaaguugagcucau

SEQ ID NO: 10810 - RNA, 22 nt, Artificial Sequence
  SAMD9 targeting guide sequence portion
aguugagcucauagaagauaaa

SEQ ID NO: 10811 - RNA, 22 nt, Artificial Sequence
  SAMD9 targeting guide sequence portion
aucuauuuuaucuucuaugagc

SEQ ID NO: 10812 - RNA, 22 nt, Artificial Sequence
  SAMD9 targeting guide sequence portion
aucuucuaugagcucaacuuuu

SEQ ID NO: 10813 - RNA, 22 nt, Artificial Sequence
  SAMD9 targeting guide sequence portion
augagcucaacuuuuagugacu

SEQ ID NO: 10814 - RNA, 22 nt, Artificial Sequence
  SAMD9 targeting guide sequence portion
auuuuaucuucuaugagcucaa

SEQ ID NO: 10815 - RNA, 22 nt, Artificial Sequence
  SAMD9 targeting guide sequence portion
cacuaaaaguugagcucauaga

SEQ ID NO: 10816 - RNA, 22 nt, Artificial Sequence
  SAMD9 targeting guide sequence portion
ccuuuguauaaucuauuuuauc

SEQ ID NO: 10817 - RNA, 22 nt, Artificial Sequence
  SAMD9 targeting guide sequence portion
cuaaaaguugagcucauagaag

SEQ ID NO: 10818 - RNA, 22 nt, Artificial Sequence
  SAMD9 targeting guide sequence portion
cuaagucacuaaaaguugagcu

SEQ ID NO: 10819 - RNA, 22 nt, Artificial Sequence
  SAMD9 targeting guide sequence portion
cuaugagcucaacuuuuaguga

SEQ ID NO: 10820 - RNA, 22 nt, Artificial Sequence
  SAMD9 targeting guide sequence portion
cuauuuuaucuucuaugagcuc

SEQ ID NO: 10821 - RNA, 22 nt, Artificial Sequence
  SAMD9 targeting guide sequence portion
cucauagaagauaaaauagauu

SEQ ID NO: 10822 - RNA, 22 nt, Artificial Sequence
  SAMD9 targeting guide sequence portion
cuucuaugagcucaacuuuuag

SEQ ID NO: 10823 - RNA, 22 nt, Artificial Sequence
  SAMD9 targeting guide sequence portion
gagcucauagaagauaaaauag

SEQ ID NO: 10824 - RNA, 22 nt, Artificial Sequence
  SAMD9 targeting guide sequence portion
gcucauagaagauaaaauagau

SEQ ID NO: 10825 - RNA, 22 nt, Artificial Sequence
  SAMD9 targeting guide sequence portion
gucacuaaaaguugagcucaua

SEQ ID NO: 10826 - RNA, 22 nt, Artificial Sequence
  SAMD9 targeting guide sequence portion
guucuaagucacuaaaaguuga

SEQ ID NO: 10827 - RNA, 22 nt, Artificial Sequence
  SAMD9 targeting guide sequence portion
guugagcucauagaagauaaaa

SEQ ID NO: 10828 - RNA, 22 nt, Artificial Sequence
  SAMD9 targeting guide sequence portion
uaaaaguugagcucauagaaga

SEQ ID NO: 10829 - RNA, 22 nt, Artificial Sequence
  SAMD9 targeting guide sequence portion
uaagucacuaaaaguugagcuc

SEQ ID NO: 10830 - RNA, 22 nt, Artificial Sequence
  SAMD9 targeting guide sequence portion
uaucuucuaugagcucaacuuu

SEQ ID NO: 10831 - RNA, 22 nt, Artificial Sequence
  SAMD9 targeting guide sequence portion
uaugagcucaacuuuuagugac

SEQ ID NO: 10832 - RNA, 22 nt, Artificial Sequence
  SAMD9 targeting guide sequence portion
uauuuuaucuucuaugagcuca

SEQ ID NO: 10833 - RNA, 22 nt, Artificial Sequence
  SAMD9 targeting guide sequence portion
ucacuaaaaguugagcucauag

SEQ ID NO: 10834 - RNA, 22 nt, Artificial Sequence
  SAMD9 targeting guide sequence portion
ucuaagucacuaaaaguugagc

SEQ ID NO: 10835 - RNA, 22 nt, Artificial Sequence
  SAMD9 targeting guide sequence portion
ucuaugagcucaacuuuuagug

SEQ ID NO: 10836 - RNA, 22 nt, Artificial Sequence
  SAMD9 targeting guide sequence portion
ucuauuuuaucuucuaugagcu

SEQ ID NO: 10837 - RNA, 22 nt, Artificial Sequence
  SAMD9 targeting guide sequence portion
ucuucuaugagcucaacuuuua

SEQ ID NO: 10838 - RNA, 22 nt, Artificial Sequence
  SAMD9 targeting guide sequence portion
ugagcucauagaagauaaaaua

SEQ ID NO: 10839 - RNA, 22 nt, Artificial Sequence
  SAMD9 targeting guide sequence portion
uuaucuucuaugagcucaacuu

SEQ ID NO: 10840 - RNA, 22 nt, Artificial Sequence
  SAMD9 targeting guide sequence portion
uucuaagucacuaaaaguugag

SEQ ID NO: 10841 - RNA, 22 nt, Artificial Sequence
  SAMD9 targeting guide sequence portion
uucuaugagcucaacuuuuagu

SEQ ID NO: 10842 - RNA, 22 nt, Artificial Sequence
  SAMD9 targeting guide sequence portion
uugagcucauagaagauaaaau

SEQ ID NO: 10843 - RNA, 22 nt, Artificial Sequence
  SAMD9 targeting guide sequence portion
uuuaucuucuaugagcucaacu

SEQ ID NO: 10844 - RNA, 22 nt, Artificial Sequence
  SAMD9 targeting guide sequence portion
uuuuaucuucuaugagcucaac

SEQ ID NO: 10845 - RNA, 20 nt, Artificial Sequence
  SAMD9 targeting guide sequence portion
aaaaguugagcucacagaag

SEQ ID NO: 10846 - RNA, 20 nt, Artificial Sequence
  SAMD9 targeting guide sequence portion
aaaguugagcucacagaaga

SEQ ID NO: 10847 - RNA, 20 nt, Artificial Sequence
  SAMD9 targeting guide sequence portion
aaguugagcucacagaagau

SEQ ID NO: 10848 - RNA, 20 nt, Artificial Sequence
  SAMD9 targeting guide sequence portion
aaucuauuuuaucuucugug

SEQ ID NO: 10849 - RNA, 20 nt, Artificial Sequence
  SAMD9 targeting guide sequence portion
acagaagauaaaauagauua

SEQ ID NO: 10850 - RNA, 20 nt, Artificial Sequence
  SAMD9 targeting guide sequence portion
acuaaaaguugagcucacag

SEQ ID NO: 10851 - RNA, 20 nt, Artificial Sequence
  SAMD9 targeting guide sequence portion
agcucacagaagauaaaaua

SEQ ID NO: 10852 - RNA, 20 nt, Artificial Sequence
  SAMD9 targeting guide sequence portion
aguugagcucacagaagaua

SEQ ID NO: 10853 - RNA, 20 nt, Artificial Sequence
  SAMD9 targeting guide sequence portion
auaaucuauuuuaucuucug

SEQ ID NO: 10854 - RNA, 20 nt, Artificial Sequence
  SAMD9 targeting guide sequence portion
aucuauuuuaucuucuguga

SEQ ID NO: 10855 - RNA, 20 nt, Artificial Sequence
  SAMD9 targeting guide sequence portion
aucuucugugagcucaacuu

SEQ ID NO: 10856 - RNA, 20 nt, Artificial Sequence
  SAMD9 targeting guide sequence portion
auuuuaucuucugugagcuc

SEQ ID NO: 10857 - RNA, 20 nt, Artificial Sequence
  SAMD9 targeting guide sequence portion
cacagaagauaaaauagauu

SEQ ID NO: 10858 - RNA, 20 nt, Artificial Sequence
  SAMD9 targeting guide sequence portion
cacuaaaaguugagcucaca

SEQ ID NO: 10859 - RNA, 20 nt, Artificial Sequence
  SAMD9 targeting guide sequence portion
cagaagauaaaauagauuau

SEQ ID NO: 10860 - RNA, 20 nt, Artificial Sequence
  SAMD9 targeting guide sequence portion
cuaaaaguugagcucacaga

SEQ ID NO: 10861 - RNA, 20 nt, Artificial Sequence
  SAMD9 targeting guide sequence portion
cuauuuuaucuucugugagc

SEQ ID NO: 10862 - RNA, 20 nt, Artificial Sequence
  SAMD9 targeting guide sequence portion
cucacagaagauaaaauaga

SEQ ID NO: 10863 - RNA, 20 nt, Artificial Sequence
  SAMD9 targeting guide sequence portion
cugugagcucaacuuuuagu

SEQ ID NO: 10864 - RNA, 20 nt, Artificial Sequence
  SAMD9 targeting guide sequence portion
cuucugugagcucaacuuuu

SEQ ID NO: 10865 - RNA, 20 nt, Artificial Sequence
  SAMD9 targeting guide sequence portion
gagcucacagaagauaaaau

SEQ ID NO: 10866 - RNA, 20 nt, Artificial Sequence
  SAMD9 targeting guide sequence portion
gcucacagaagauaaaauag

SEQ ID NO: 10867 - RNA, 20 nt, Artificial Sequence
  SAMD9 targeting guide sequence portion
gugagcucaacuuuuaguga

SEQ ID NO: 10868 - RNA, 20 nt, Artificial Sequence
  SAMD9 targeting guide sequence portion
guugagcucacagaagauaa

SEQ ID NO: 10869 - RNA, 20 nt, Artificial Sequence
  SAMD9 targeting guide sequence portion
uaaaaguugagcucacagaa

SEQ ID NO: 10870 - RNA, 20 nt, Artificial Sequence
  SAMD9 targeting guide sequence portion
uaaucuauuuuaucuucugu

SEQ ID NO: 10871 - RNA, 20 nt, Artificial Sequence
  SAMD9 targeting guide sequence portion
uaucuucugugagcucaacu

SEQ ID NO: 10872 - RNA, 20 nt, Artificial Sequence
  SAMD9 targeting guide sequence portion
uauuuuaucuucugugagcu

SEQ ID NO: 10873 - RNA, 20 nt, Artificial Sequence
  SAMD9 targeting guide sequence portion
ucacagaagauaaaauagau

SEQ ID NO: 10874 - RNA, 20 nt, Artificial Sequence
  SAMD9 targeting guide sequence portion
ucacuaaaaguugagcucac

SEQ ID NO: 10875 - RNA, 20 nt, Artificial Sequence
  SAMD9 targeting guide sequence portion
ucuauuuuaucuucugugag

SEQ ID NO: 10876 - RNA, 20 nt, Artificial Sequence
  SAMD9 targeting guide sequence portion
ucugugagcucaacuuuuag

SEQ ID NO: 10877 - RNA, 20 nt, Artificial Sequence
  SAMD9 targeting guide sequence portion
ucuucugugagcucaacuuu

SEQ ID NO: 10878 - RNA, 20 nt, Artificial Sequence
  SAMD9 targeting guide sequence portion
ugagcucacagaagauaaaa

SEQ ID NO: 10879 - RNA, 20 nt, Artificial Sequence
  SAMD9 targeting guide sequence portion
ugugagcucaacuuuuagug

SEQ ID NO: 10880 - RNA, 20 nt, Artificial Sequence
  SAMD9 targeting guide sequence portion
uuaucuucugugagcucaac

SEQ ID NO: 10881 - RNA, 20 nt, Artificial Sequence
  SAMD9 targeting guide sequence portion
uucugugagcucaacuuuua

SEQ ID NO: 10882 - RNA, 20 nt, Artificial Sequence
  SAMD9 targeting guide sequence portion
uugagcucacagaagauaaa

SEQ ID NO: 10883 - RNA, 20 nt, Artificial Sequence
  SAMD9 targeting guide sequence portion
uuuaucuucugugagcucaa

SEQ ID NO: 10884 - RNA, 20 nt, Artificial Sequence
  SAMD9 targeting guide sequence portion
uuuuaucuucugugagcuca

SEQ ID NO: 10885 - RNA, 21 nt, Artificial Sequence
  SAMD9 targeting guide sequence portion
aaaaguugagcucacagaaga

SEQ ID NO: 10886 - RNA, 21 nt, Artificial Sequence
  SAMD9 targeting guide sequence portion
aaaguugagcucacagaagau

SEQ ID NO: 10887 - RNA, 21 nt, Artificial Sequence
  SAMD9 targeting guide sequence portion
aaguugagcucacagaagaua

SEQ ID NO: 10888 - RNA, 21 nt, Artificial Sequence
  SAMD9 targeting guide sequence portion
aaucuauuuuaucuucuguga

SEQ ID NO: 10889 - RNA, 21 nt, Artificial Sequence
  SAMD9 targeting guide sequence portion
acuaaaaguugagcucacaga

SEQ ID NO: 10890 - RNA, 21 nt, Artificial Sequence
  SAMD9 targeting guide sequence portion
agcucacagaagauaaaauag

SEQ ID NO: 10891 - RNA, 21 nt, Artificial Sequence
  SAMD9 targeting guide sequence portion
aguugagcucacagaagauaa

SEQ ID NO: 10892 - RNA, 21 nt, Artificial Sequence
  SAMD9 targeting guide sequence portion
aucuauuuuaucuucugugag

SEQ ID NO: 10893 - RNA, 21 nt, Artificial Sequence
  SAMD9 targeting guide sequence portion
aucuucugugagcucaacuuu

SEQ ID NO: 10894 - RNA, 21 nt, Artificial Sequence
  SAMD9 targeting guide sequence portion
auuuuaucuucugugagcuca

SEQ ID NO: 10895 - RNA, 21 nt, Artificial Sequence
  SAMD9 targeting guide sequence portion
cacagaagauaaaauagauua

SEQ ID NO: 10896 - RNA, 21 nt, Artificial Sequence
  SAMD9 targeting guide sequence portion
cacuaaaaguugagcucacag

SEQ ID NO: 10897 - RNA, 21 nt, Artificial Sequence
  SAMD9 targeting guide sequence portion
cuaaaaguugagcucacagaa

SEQ ID NO: 10898 - RNA, 21 nt, Artificial Sequence
  SAMD9 targeting guide sequence portion
cuauuuuaucuucugugagcu

SEQ ID NO: 10899 - RNA, 21 nt, Artificial Sequence
  SAMD9 targeting guide sequence portion
cucacagaagauaaaauagau

SEQ ID NO: 10900 - RNA, 21 nt, Artificial Sequence
  SAMD9 targeting guide sequence portion
cugugagcucaacuuuuagug

SEQ ID NO: 10901 - RNA, 21 nt, Artificial Sequence
  SAMD9 targeting guide sequence portion
cuucugugagcucaacuuuua

SEQ ID NO: 10902 - RNA, 21 nt, Artificial Sequence
  SAMD9 targeting guide sequence portion
gagcucacagaagauaaaaua

SEQ ID NO: 10903 - RNA, 21 nt, Artificial Sequence
  SAMD9 targeting guide sequence portion
gcucacagaagauaaaauaga

SEQ ID NO: 10904 - RNA, 21 nt, Artificial Sequence
  SAMD9 targeting guide sequence portion
gucacuaaaaguugagcucac

SEQ ID NO: 10905 - RNA, 21 nt, Artificial Sequence
  SAMD9 targeting guide sequence portion
gugagcucaacuuuuagugac

SEQ ID NO: 10906 - RNA, 21 nt, Artificial Sequence
  SAMD9 targeting guide sequence portion
guugagcucacagaagauaaa

SEQ ID NO: 10907 - RNA, 21 nt, Artificial Sequence
  SAMD9 targeting guide sequence portion
uaaaaguugagcucacagaag

SEQ ID NO: 10908 - RNA, 21 nt, Artificial Sequence
  SAMD9 targeting guide sequence portion
uaaucuauuuuaucuucugug

SEQ ID NO: 10909 - RNA, 21 nt, Artificial Sequence
  SAMD9 targeting guide sequence portion
uaucuucugugagcucaacuu

SEQ ID NO: 10910 - RNA, 21 nt, Artificial Sequence
  SAMD9 targeting guide sequence portion
uauuuuaucuucugugagcuc

SEQ ID NO: 10911 - RNA, 21 nt, Artificial Sequence
  SAMD9 targeting guide sequence portion
ucacagaagauaaaauagauu

SEQ ID NO: 10912 - RNA, 21 nt, Artificial Sequence
  SAMD9 targeting guide sequence portion
ucacuaaaaguugagcucaca

SEQ ID NO: 10913 - RNA, 21 nt, Artificial Sequence
  SAMD9 targeting guide sequence portion
ucuauuuuaucuucugugagc

SEQ ID NO: 10914 - RNA, 21 nt, Artificial Sequence
  SAMD9 targeting guide sequence portion
ucugugagcucaacuuuuagu

SEQ ID NO: 10915 - RNA, 21 nt, Artificial Sequence
  SAMD9 targeting guide sequence portion
ucuucugugagcucaacuuuu

SEQ ID NO: 10916 - RNA, 21 nt, Artificial Sequence
  SAMD9 targeting guide sequence portion
ugagcucacagaagauaaaau

SEQ ID NO: 10917 - RNA, 21 nt, Artificial Sequence
  SAMD9 targeting guide sequence portion
ugugagcucaacuuuuaguga

SEQ ID NO: 10918 - RNA, 21 nt, Artificial Sequence
  SAMD9 targeting guide sequence portion
uuaucuucugugagcucaacu

SEQ ID NO: 10919 - RNA, 21 nt, Artificial Sequence
  SAMD9 targeting guide sequence portion
uucugugagcucaacuuuuag

SEQ ID NO: 10920 - RNA, 21 nt, Artificial Sequence
  SAMD9 targeting guide sequence portion
uugagcucacagaagauaaaa

SEQ ID NO: 10921 - RNA, 21 nt, Artificial Sequence
  SAMD9 targeting guide sequence portion
uuuaucuucugugagcucaac

SEQ ID NO: 10922 - RNA, 21 nt, Artificial Sequence
  SAMD9 targeting guide sequence portion
uuuuaucuucugugagcucaa

SEQ ID NO: 10923 - RNA, 22 nt, Artificial Sequence
  SAMD9 targeting guide sequence portion
aaaaguugagcucacagaagau

SEQ ID NO: 10924 - RNA, 22 nt, Artificial Sequence
  SAMD9 targeting guide sequence portion
aaaguugagcucacagaagaua

SEQ ID NO: 10925 - RNA, 22 nt, Artificial Sequence
  SAMD9 targeting guide sequence portion
aaguugagcucacagaagauaa

SEQ ID NO: 10926 - RNA, 22 nt, Artificial Sequence
  SAMD9 targeting guide sequence portion
aaucuauuuuaucuucugugag

SEQ ID NO: 10927 - RNA, 22 nt, Artificial Sequence
  SAMD9 targeting guide sequence portion
acuaaaaguugagcucacagaa

SEQ ID NO: 10928 - RNA, 22 nt, Artificial Sequence
  SAMD9 targeting guide sequence portion
agcucacagaagauaaaauaga

SEQ ID NO: 10929 - RNA, 22 nt, Artificial Sequence
  SAMD9 targeting guide sequence portion
agucacuaaaaguugagcucac

SEQ ID NO: 10930 - RNA, 22 nt, Artificial Sequence
  SAMD9 targeting guide sequence portion
aguugagcucacagaagauaaa

SEQ ID NO: 10931 - RNA, 22 nt, Artificial Sequence
  SAMD9 targeting guide sequence portion
auaaucuauuuuaucuucugug

SEQ ID NO: 10932 - RNA, 22 nt, Artificial Sequence
  SAMD9 targeting guide sequence portion
aucuauuuuaucuucugugagc

SEQ ID NO: 10933 - RNA, 22 nt, Artificial Sequence
  SAMD9 targeting guide sequence portion
aucuucugugagcucaacuuuu

SEQ ID NO: 10934 - RNA, 22 nt, Artificial Sequence
  SAMD9 targeting guide sequence portion
auuuuaucuucugugagcucaa

SEQ ID NO: 10935 - RNA, 22 nt, Artificial Sequence
  SAMD9 targeting guide sequence portion
cacagaagauaaaauagauuau

SEQ ID NO: 10936 - RNA, 22 nt, Artificial Sequence
  SAMD9 targeting guide sequence portion
cacuaaaaguugagcucacaga

SEQ ID NO: 10937 - RNA, 22 nt, Artificial Sequence
  SAMD9 targeting guide sequence portion
cagaagauaaaauagauuauac

SEQ ID NO: 10938 - RNA, 22 nt, Artificial Sequence
  SAMD9 targeting guide sequence portion
cuaaaaguugagcucacagaag

SEQ ID NO: 10939 - RNA, 22 nt, Artificial Sequence
  SAMD9 targeting guide sequence portion
cuauuuuaucuucugugagcuc

SEQ ID NO: 10940 - RNA, 22 nt, Artificial Sequence
  SAMD9 targeting guide sequence portion
cucacagaagauaaaauagauu

SEQ ID NO: 10941 - RNA, 22 nt, Artificial Sequence
  SAMD9 targeting guide sequence portion
cugugagcucaacuuuuaguga

SEQ ID NO: 10942 - RNA, 22 nt, Artificial Sequence
  SAMD9 targeting guide sequence portion
cuucugugagcucaacuuuuag

SEQ ID NO: 10943 - RNA, 22 nt, Artificial Sequence
  SAMD9 targeting guide sequence portion
gagcucacagaagauaaaauag

SEQ ID NO: 10944 - RNA, 22 nt, Artificial Sequence
  SAMD9 targeting guide sequence portion
gcucacagaagauaaaauagau

SEQ ID NO: 10945 - RNA, 22 nt, Artificial Sequence
  SAMD9 targeting guide sequence portion
guauaaucuauuuuaucuucug

SEQ ID NO: 10946 - RNA, 22 nt, Artificial Sequence
  SAMD9 targeting guide sequence portion
gucacuaaaaguugagcucaca

SEQ ID NO: 10947 - RNA, 22 nt, Artificial Sequence
  SAMD9 targeting guide sequence portion
gugagcucaacuuuuagugacu

SEQ ID NO: 10948 - RNA, 22 nt, Artificial Sequence
  SAMD9 targeting guide sequence portion
guugagcucacagaagauaaaa

SEQ ID NO: 10949 - RNA, 22 nt, Artificial Sequence
  SAMD9 targeting guide sequence portion
uaaaaguugagcucacagaaga

SEQ ID NO: 10950 - RNA, 22 nt, Artificial Sequence
  SAMD9 targeting guide sequence portion
uaaucuauuuuaucuucuguga

SEQ ID NO: 10951 - RNA, 22 nt, Artificial Sequence
  SAMD9 targeting guide sequence portion
uaucuucugugagcucaacuuu

SEQ ID NO: 10952 - RNA, 22 nt, Artificial Sequence
  SAMD9 targeting guide sequence portion
uauuuuaucuucugugagcuca

SEQ ID NO: 10953 - RNA, 22 nt, Artificial Sequence
  SAMD9 targeting guide sequence portion
ucacagaagauaaaauagauua

SEQ ID NO: 10954 - RNA, 22 nt, Artificial Sequence
  SAMD9 targeting guide sequence portion
ucacuaaaaguugagcucacag

SEQ ID NO: 10955 - RNA, 22 nt, Artificial Sequence
  SAMD9 targeting guide sequence portion
ucuauuuuaucuucugugagcu

SEQ ID NO: 10956 - RNA, 22 nt, Artificial Sequence
  SAMD9 targeting guide sequence portion
ucugugagcucaacuuuuagug

SEQ ID NO: 10957 - RNA, 22 nt, Artificial Sequence
  SAMD9 targeting guide sequence portion
ucuucugugagcucaacuuuua

SEQ ID NO: 10958 - RNA, 22 nt, Artificial Sequence
  SAMD9 targeting guide sequence portion
ugagcucacagaagauaaaaua

SEQ ID NO: 10959 - RNA, 22 nt, Artificial Sequence
  SAMD9 targeting guide sequence portion
ugugagcucaacuuuuagugac

SEQ ID NO: 10960 - RNA, 22 nt, Artificial Sequence
  SAMD9 targeting guide sequence portion
uuaucuucugugagcucaacuu

SEQ ID NO: 10961 - RNA, 22 nt, Artificial Sequence
  SAMD9 targeting guide sequence portion
uucugugagcucaacuuuuagu

SEQ ID NO: 10962 - RNA, 22 nt, Artificial Sequence
  SAMD9 targeting guide sequence portion
uugagcucacagaagauaaaau

SEQ ID NO: 10963 - RNA, 22 nt, Artificial Sequence
  SAMD9 targeting guide sequence portion
uuuaucuucugugagcucaacu

SEQ ID NO: 10964 - RNA, 22 nt, Artificial Sequence
  SAMD9 targeting guide sequence portion
uuuuaucuucugugagcucaac

SEQ ID NO: 10965 - RNA, 20 nt, Artificial Sequence
  SAMD9 targeting guide sequence portion
aaaaacagcaaaugcuucau

SEQ ID NO: 10966 - RNA, 20 nt, Artificial Sequence
  SAMD9 targeting guide sequence portion
aaaacagcaaaugcuucaug

SEQ ID NO: 10967 - RNA, 20 nt, Artificial Sequence
  SAMD9 targeting guide sequence portion
aaacagcaaaugcuucaugu

SEQ ID NO: 10968 - RNA, 20 nt, Artificial Sequence
  SAMD9 targeting guide sequence portion
aaauauucaugagacacaca

SEQ ID NO: 10969 - RNA, 20 nt, Artificial Sequence
  SAMD9 targeting guide sequence portion
aaaugcuucaugugugucuc

SEQ ID NO: 10970 - RNA, 20 nt, Artificial Sequence
  SAMD9 targeting guide sequence portion
aacagcaaaugcuucaugug

SEQ ID NO: 10971 - RNA, 20 nt, Artificial Sequence
  SAMD9 targeting guide sequence portion
aauaguaaauauucaugaga

SEQ ID NO: 10972 - RNA, 20 nt, Artificial Sequence
  SAMD9 targeting guide sequence portion
aauauucaugagacacacau

SEQ ID NO: 10973 - RNA, 20 nt, Artificial Sequence
  SAMD9 targeting guide sequence portion
aaugcuucaugugugucuca

SEQ ID NO: 10974 - RNA, 20 nt, Artificial Sequence
  SAMD9 targeting guide sequence portion
acacacaugaagcauuugcu

SEQ ID NO: 10975 - RNA, 20 nt, Artificial Sequence
  SAMD9 targeting guide sequence portion
acacaugaagcauuugcugu

SEQ ID NO: 10976 - RNA, 20 nt, Artificial Sequence
  SAMD9 targeting guide sequence portion
acagcaaaugcuucaugugu

SEQ ID NO: 10977 - RNA, 20 nt, Artificial Sequence
  SAMD9 targeting guide sequence portion
acaugaagcauuugcuguuu

SEQ ID NO: 10978 - RNA, 20 nt, Artificial Sequence
  SAMD9 targeting guide sequence portion
accugaaaaacagcaaaugc

SEQ ID NO: 10979 - RNA, 20 nt, Artificial Sequence
  SAMD9 targeting guide sequence portion
agacacacaugaagcauuug

SEQ ID NO: 10980 - RNA, 20 nt, Artificial Sequence
  SAMD9 targeting guide sequence portion
agcaaaugcuucaugugugu

SEQ ID NO: 10981 - RNA, 20 nt, Artificial Sequence
  SAMD9 targeting guide sequence portion
aguaaauauucaugagacac

SEQ ID NO: 10982 - RNA, 20 nt, Artificial Sequence
  SAMD9 targeting guide sequence portion
auaguaaauauucaugagac

SEQ ID NO: 10983 - RNA, 20 nt, Artificial Sequence
  SAMD9 targeting guide sequence portion
auauucaugagacacacaug

SEQ ID NO: 10984 - RNA, 20 nt, Artificial Sequence
  SAMD9 targeting guide sequence portion
augaagcauuugcuguuuuu

SEQ ID NO: 10985 - RNA, 20 nt, Artificial Sequence
  SAMD9 targeting guide sequence portion
augagacacacaugaagcau

SEQ ID NO: 10986 - RNA, 20 nt, Artificial Sequence
  SAMD9 targeting guide sequence portion
augcuucaugugugucucau

SEQ ID NO: 10987 - RNA, 20 nt, Artificial Sequence
  SAMD9 targeting guide sequence portion
augugugucucaugaauauu

SEQ ID NO: 10988 - RNA, 20 nt, Artificial Sequence
  SAMD9 targeting guide sequence portion
auucaugagacacacaugaa

SEQ ID NO: 10989 - RNA, 20 nt, Artificial Sequence
  SAMD9 targeting guide sequence portion
caaaugcuucaugugugucu

SEQ ID NO: 10990 - RNA, 20 nt, Artificial Sequence
  SAMD9 targeting guide sequence portion
cacacaugaagcauuugcug

SEQ ID NO: 10991 - RNA, 20 nt, Artificial Sequence
  SAMD9 targeting guide sequence portion
cacaugaagcauuugcuguu

SEQ ID NO: 10992 - RNA, 20 nt, Artificial Sequence
  SAMD9 targeting guide sequence portion
cagcaaaugcuucaugugug

SEQ ID NO: 10993 - RNA, 20 nt, Artificial Sequence
  SAMD9 targeting guide sequence portion
caugaagcauuugcuguuuu

SEQ ID NO: 10994 - RNA, 20 nt, Artificial Sequence
  SAMD9 targeting guide sequence portion
caugagacacacaugaagca

SEQ ID NO: 10995 - RNA, 20 nt, Artificial Sequence
  SAMD9 targeting guide sequence portion
caugugugucucaugaauau

SEQ ID NO: 10996 - RNA, 20 nt, Artificial Sequence
  SAMD9 targeting guide sequence portion
ccugaaaaacagcaaaugcu

SEQ ID NO: 10997 - RNA, 20 nt, Artificial Sequence
  SAMD9 targeting guide sequence portion
cugaaaaacagcaaaugcuu

SEQ ID NO: 10998 - RNA, 20 nt, Artificial Sequence
  SAMD9 targeting guide sequence portion
cuucaugugugucucaugaa

SEQ ID NO: 10999 - RNA, 20 nt, Artificial Sequence
  SAMD9 targeting guide sequence portion
gaaaaacagcaaaugcuuca

SEQ ID NO: 11000 - RNA, 20 nt, Artificial Sequence
  SAMD9 targeting guide sequence portion
gacacacaugaagcauuugc

SEQ ID NO: 11001 - RNA, 20 nt, Artificial Sequence
  SAMD9 targeting guide sequence portion
gaccugaaaaacagcaaaug

SEQ ID NO: 11002 - RNA, 20 nt, Artificial Sequence
  SAMD9 targeting guide sequence portion
gagacacacaugaagcauuu

SEQ ID NO: 11003 - RNA, 20 nt, Artificial Sequence
  SAMD9 targeting guide sequence portion
gcaaaugcuucauguguguc

SEQ ID NO: 11004 - RNA, 20 nt, Artificial Sequence
  SAMD9 targeting guide sequence portion
gcuucaugugugucucauga

SEQ ID NO: 11005 - RNA, 20 nt, Artificial Sequence
  SAMD9 targeting guide sequence portion
guaaauauucaugagacaca

SEQ ID NO: 11006 - RNA, 20 nt, Artificial Sequence
  SAMD9 targeting guide sequence portion
uaaauauucaugagacacac

SEQ ID NO: 11007 - RNA, 20 nt, Artificial Sequence
  SAMD9 targeting guide sequence portion
uaguaaauauucaugagaca

SEQ ID NO: 11008 - RNA, 20 nt, Artificial Sequence
  SAMD9 targeting guide sequence portion
uauucaugagacacacauga

SEQ ID NO: 11009 - RNA, 20 nt, Artificial Sequence
  SAMD9 targeting guide sequence portion
ucaugagacacacaugaagc

SEQ ID NO: 11010 - RNA, 20 nt, Artificial Sequence
  SAMD9 targeting guide sequence portion
ucaugugugucucaugaaua

SEQ ID NO: 11011 - RNA, 20 nt, Artificial Sequence
  SAMD9 targeting guide sequence portion
ugaaaaacagcaaaugcuuc

SEQ ID NO: 11012 - RNA, 20 nt, Artificial Sequence
  SAMD9 targeting guide sequence portion
ugagacacacaugaagcauu

SEQ ID NO: 11013 - RNA, 20 nt, Artificial Sequence
  SAMD9 targeting guide sequence portion
ugcuucaugugugucucaug

SEQ ID NO: 11014 - RNA, 20 nt, Artificial Sequence
  SAMD9 targeting guide sequence portion
ugugugucucaugaauauuu

SEQ ID NO: 11015 - RNA, 20 nt, Artificial Sequence
  SAMD9 targeting guide sequence portion
uucaugagacacacaugaag

SEQ ID NO: 11016 - RNA, 20 nt, Artificial Sequence
  SAMD9 targeting guide sequence portion
uucaugugugucucaugaau

SEQ ID NO: 11017 - RNA, 21 nt, Artificial Sequence
  SAMD9 targeting guide sequence portion
aaaaacagcaaaugcuucaug

SEQ ID NO: 11018 - RNA, 21 nt, Artificial Sequence
  SAMD9 targeting guide sequence portion
aaaacagcaaaugcuucaugu

SEQ ID NO: 11019 - RNA, 21 nt, Artificial Sequence
  SAMD9 targeting guide sequence portion
aaacagcaaaugcuucaugug

SEQ ID NO: 11020 - RNA, 21 nt, Artificial Sequence
  SAMD9 targeting guide sequence portion
aaauauucaugagacacacau

SEQ ID NO: 11021 - RNA, 21 nt, Artificial Sequence
  SAMD9 targeting guide sequence portion
aaaugcuucaugugugucuca

SEQ ID NO: 11022 - RNA, 21 nt, Artificial Sequence
  SAMD9 targeting guide sequence portion
aacagcaaaugcuucaugugu

SEQ ID NO: 11023 - RNA, 21 nt, Artificial Sequence
  SAMD9 targeting guide sequence portion
aauaguaaauauucaugagac

SEQ ID NO: 11024 - RNA, 21 nt, Artificial Sequence
  SAMD9 targeting guide sequence portion
aauauucaugagacacacaug

SEQ ID NO: 11025 - RNA, 21 nt, Artificial Sequence
  SAMD9 targeting guide sequence portion
aaugcuucaugugugucucau

SEQ ID NO: 11026 - RNA, 21 nt, Artificial Sequence
  SAMD9 targeting guide sequence portion
acacacaugaagcauuugcug

SEQ ID NO: 11027 - RNA, 21 nt, Artificial Sequence
  SAMD9 targeting guide sequence portion
acacaugaagcauuugcuguu

SEQ ID NO: 11028 - RNA, 21 nt, Artificial Sequence
  SAMD9 targeting guide sequence portion
acagcaaaugcuucaugugug

SEQ ID NO: 11029 - RNA, 21 nt, Artificial Sequence
  SAMD9 targeting guide sequence portion
acaugaagcauuugcuguuuu

SEQ ID NO: 11030 - RNA, 21 nt, Artificial Sequence
  SAMD9 targeting guide sequence portion
accugaaaaacagcaaaugcu

SEQ ID NO: 11031 - RNA, 21 nt, Artificial Sequence
  SAMD9 targeting guide sequence portion
agacacacaugaagcauuugc

SEQ ID NO: 11032 - RNA, 21 nt, Artificial Sequence
  SAMD9 targeting guide sequence portion
agaccugaaaaacagcaaaug

SEQ ID NO: 11033 - RNA, 21 nt, Artificial Sequence
  SAMD9 targeting guide sequence portion
agcaaaugcuucauguguguc

SEQ ID NO: 11034 - RNA, 21 nt, Artificial Sequence
  SAMD9 targeting guide sequence portion
aguaaauauucaugagacaca

SEQ ID NO: 11035 - RNA, 21 nt, Artificial Sequence
  SAMD9 targeting guide sequence portion
auaguaaauauucaugagaca

SEQ ID NO: 11036 - RNA, 21 nt, Artificial Sequence
  SAMD9 targeting guide sequence portion
auauucaugagacacacauga

SEQ ID NO: 11037 - RNA, 21 nt, Artificial Sequence
  SAMD9 targeting guide sequence portion
augaagcauuugcuguuuuuc

SEQ ID NO: 11038 - RNA, 21 nt, Artificial Sequence
  SAMD9 targeting guide sequence portion
augagacacacaugaagcauu

SEQ ID NO: 11039 - RNA, 21 nt, Artificial Sequence
  SAMD9 targeting guide sequence portion
augcuucaugugugucucaug

SEQ ID NO: 11040 - RNA, 21 nt, Artificial Sequence
  SAMD9 targeting guide sequence portion
augugugucucaugaauauuu

SEQ ID NO: 11041 - RNA, 21 nt, Artificial Sequence
  SAMD9 targeting guide sequence portion
auucaugagacacacaugaag

SEQ ID NO: 11042 - RNA, 21 nt, Artificial Sequence
  SAMD9 targeting guide sequence portion
caaaugcuucaugugugucuc

SEQ ID NO: 11043 - RNA, 21 nt, Artificial Sequence
  SAMD9 targeting guide sequence portion
cacacaugaagcauuugcugu

SEQ ID NO: 11044 - RNA, 21 nt, Artificial Sequence
  SAMD9 targeting guide sequence portion
cacaugaagcauuugcuguuu

SEQ ID NO: 11045 - RNA, 21 nt, Artificial Sequence
  SAMD9 targeting guide sequence portion
cagcaaaugcuucaugugugu

SEQ ID NO: 11046 - RNA, 21 nt, Artificial Sequence
  SAMD9 targeting guide sequence portion
caugaagcauuugcuguuuuu

SEQ ID NO: 11047 - RNA, 21 nt, Artificial Sequence
  SAMD9 targeting guide sequence portion
caugagacacacaugaagcau

SEQ ID NO: 11048 - RNA, 21 nt, Artificial Sequence
  SAMD9 targeting guide sequence portion
caugugugucucaugaauauu

SEQ ID NO: 11049 - RNA, 21 nt, Artificial Sequence
  SAMD9 targeting guide sequence portion
ccugaaaaacagcaaaugcuu

SEQ ID NO: 11050 - RNA, 21 nt, Artificial Sequence
  SAMD9 targeting guide sequence portion
cugaaaaacagcaaaugcuuc

SEQ ID NO: 11051 - RNA, 21 nt, Artificial Sequence
  SAMD9 targeting guide sequence portion
cuucaugugugucucaugaau

SEQ ID NO: 11052 - RNA, 21 nt, Artificial Sequence
  SAMD9 targeting guide sequence portion
gaaaaacagcaaaugcuucau

SEQ ID NO: 11053 - RNA, 21 nt, Artificial Sequence
  SAMD9 targeting guide sequence portion
gacacacaugaagcauuugcu

SEQ ID NO: 11054 - RNA, 21 nt, Artificial Sequence
  SAMD9 targeting guide sequence portion
gaccugaaaaacagcaaaugc

SEQ ID NO: 11055 - RNA, 21 nt, Artificial Sequence
  SAMD9 targeting guide sequence portion
gagacacacaugaagcauuug

SEQ ID NO: 11056 - RNA, 21 nt, Artificial Sequence
  SAMD9 targeting guide sequence portion
gcaaaugcuucaugugugucu

SEQ ID NO: 11057 - RNA, 21 nt, Artificial Sequence
  SAMD9 targeting guide sequence portion
gcuucaugugugucucaugaa

SEQ ID NO: 11058 - RNA, 21 nt, Artificial Sequence
  SAMD9 targeting guide sequence portion
guaaauauucaugagacacac

SEQ ID NO: 11059 - RNA, 21 nt, Artificial Sequence
  SAMD9 targeting guide sequence portion
uaaauauucaugagacacaca

SEQ ID NO: 11060 - RNA, 21 nt, Artificial Sequence
  SAMD9 targeting guide sequence portion
uaguaaauauucaugagacac

SEQ ID NO: 11061 - RNA, 21 nt, Artificial Sequence
  SAMD9 targeting guide sequence portion
uauucaugagacacacaugaa

SEQ ID NO: 11062 - RNA, 21 nt, Artificial Sequence
  SAMD9 targeting guide sequence portion
ucaugagacacacaugaagca

SEQ ID NO: 11063 - RNA, 21 nt, Artificial Sequence
  SAMD9 targeting guide sequence portion
ucaugugugucucaugaauau

SEQ ID NO: 11064 - RNA, 21 nt, Artificial Sequence
  SAMD9 targeting guide sequence portion
ugaaaaacagcaaaugcuuca

SEQ ID NO: 11065 - RNA, 21 nt, Artificial Sequence
  SAMD9 targeting guide sequence portion
ugagacacacaugaagcauuu

SEQ ID NO: 11066 - RNA, 21 nt, Artificial Sequence
  SAMD9 targeting guide sequence portion
ugcuucaugugugucucauga

SEQ ID NO: 11067 - RNA, 21 nt, Artificial Sequence
  SAMD9 targeting guide sequence portion
ugugugucucaugaauauuua

SEQ ID NO: 11068 - RNA, 21 nt, Artificial Sequence
  SAMD9 targeting guide sequence portion
uucaugagacacacaugaagc

SEQ ID NO: 11069 - RNA, 21 nt, Artificial Sequence
  SAMD9 targeting guide sequence portion
uucaugugugucucaugaaua

SEQ ID NO: 11070 - RNA, 22 nt, Artificial Sequence
  SAMD9 targeting guide sequence portion
aaaaacagcaaaugcuucaugu

SEQ ID NO: 11071 - RNA, 22 nt, Artificial Sequence
  SAMD9 targeting guide sequence portion
aaaacagcaaaugcuucaugug

SEQ ID NO: 11072 - RNA, 22 nt, Artificial Sequence
  SAMD9 targeting guide sequence portion
aaacagcaaaugcuucaugugu

SEQ ID NO: 11073 - RNA, 22 nt, Artificial Sequence
  SAMD9 targeting guide sequence portion
aaauaguaaauauucaugagac

SEQ ID NO: 11074 - RNA, 22 nt, Artificial Sequence
  SAMD9 targeting guide sequence portion
aaauauucaugagacacacaug

SEQ ID NO: 11075 - RNA, 22 nt, Artificial Sequence
  SAMD9 targeting guide sequence portion
aaaugcuucaugugugucucau

SEQ ID NO: 11076 - RNA, 22 nt, Artificial Sequence
  SAMD9 targeting guide sequence portion
aacagcaaaugcuucaugugug

SEQ ID NO: 11077 - RNA, 22 nt, Artificial Sequence
  SAMD9 targeting guide sequence portion
aauaguaaauauucaugagaca

SEQ ID NO: 11078 - RNA, 22 nt, Artificial Sequence
  SAMD9 targeting guide sequence portion
aauauucaugagacacacauga

SEQ ID NO: 11079 - RNA, 22 nt, Artificial Sequence
  SAMD9 targeting guide sequence portion
aaugcuucaugugugucucaug

SEQ ID NO: 11080 - RNA, 22 nt, Artificial Sequence
  SAMD9 targeting guide sequence portion
acacacaugaagcauuugcugu

SEQ ID NO: 11081 - RNA, 22 nt, Artificial Sequence
  SAMD9 targeting guide sequence portion
acacaugaagcauuugcuguuu

SEQ ID NO: 11082 - RNA, 22 nt, Artificial Sequence
  SAMD9 targeting guide sequence portion
acagcaaaugcuucaugugugu

SEQ ID NO: 11083 - RNA, 22 nt, Artificial Sequence
  SAMD9 targeting guide sequence portion
acaugaagcauuugcuguuuuu

SEQ ID NO: 11084 - RNA, 22 nt, Artificial Sequence
  SAMD9 targeting guide sequence portion
accugaaaaacagcaaaugcuu

SEQ ID NO: 11085 - RNA, 22 nt, Artificial Sequence
  SAMD9 targeting guide sequence portion
agacacacaugaagcauuugcu

SEQ ID NO: 11086 - RNA, 22 nt, Artificial Sequence
  SAMD9 targeting guide sequence portion
agaccugaaaaacagcaaaugc

SEQ ID NO: 11087 - RNA, 22 nt, Artificial Sequence
  SAMD9 targeting guide sequence portion
agcaaaugcuucaugugugucu

SEQ ID NO: 11088 - RNA, 22 nt, Artificial Sequence
  SAMD9 targeting guide sequence portion
aguaaauauucaugagacacac

SEQ ID NO: 11089 - RNA, 22 nt, Artificial Sequence
  SAMD9 targeting guide sequence portion
auaguaaauauucaugagacac

SEQ ID NO: 11090 - RNA, 22 nt, Artificial Sequence
  SAMD9 targeting guide sequence portion
auauucaugagacacacaugaa

SEQ ID NO: 11091 - RNA, 22 nt, Artificial Sequence
  SAMD9 targeting guide sequence portion
augaagcauuugcuguuuuuca

SEQ ID NO: 11092 - RNA, 22 nt, Artificial Sequence
  SAMD9 targeting guide sequence portion
augagacacacaugaagcauuu

SEQ ID NO: 11093 - RNA, 22 nt, Artificial Sequence
  SAMD9 targeting guide sequence portion
augcuucaugugugucucauga

SEQ ID NO: 11094 - RNA, 22 nt, Artificial Sequence
  SAMD9 targeting guide sequence portion
augugugucucaugaauauuua

SEQ ID NO: 11095 - RNA, 22 nt, Artificial Sequence
  SAMD9 targeting guide sequence portion
auucaugagacacacaugaagc

SEQ ID NO: 11096 - RNA, 22 nt, Artificial Sequence
  SAMD9 targeting guide sequence portion
caaauaguaaauauucaugaga

SEQ ID NO: 11097 - RNA, 22 nt, Artificial Sequence
  SAMD9 targeting guide sequence portion
caaaugcuucaugugugucuca

SEQ ID NO: 11098 - RNA, 22 nt, Artificial Sequence
  SAMD9 targeting guide sequence portion
cacacaugaagcauuugcuguu

SEQ ID NO: 11099 - RNA, 22 nt, Artificial Sequence
  SAMD9 targeting guide sequence portion
cacaugaagcauuugcuguuuu

SEQ ID NO: 11100 - RNA, 22 nt, Artificial Sequence
  SAMD9 targeting guide sequence portion
cagcaaaugcuucauguguguc

SEQ ID NO: 11101 - RNA, 22 nt, Artificial Sequence
  SAMD9 targeting guide sequence portion
caugaagcauuugcuguuuuuc

SEQ ID NO: 11102 - RNA, 22 nt, Artificial Sequence
  SAMD9 targeting guide sequence portion
caugagacacacaugaagcauu

SEQ ID NO: 11103 - RNA, 22 nt, Artificial Sequence
  SAMD9 targeting guide sequence portion
caugugugucucaugaauauuu

SEQ ID NO: 11104 - RNA, 22 nt, Artificial Sequence
  SAMD9 targeting guide sequence portion
ccugaaaaacagcaaaugcuuc

SEQ ID NO: 11105 - RNA, 22 nt, Artificial Sequence
  SAMD9 targeting guide sequence portion
cugaaaaacagcaaaugcuuca

SEQ ID NO: 11106 - RNA, 22 nt, Artificial Sequence
  SAMD9 targeting guide sequence portion
cuucaugugugucucaugaaua

SEQ ID NO: 11107 - RNA, 22 nt, Artificial Sequence
  SAMD9 targeting guide sequence portion
gaaaaacagcaaaugcuucaug

SEQ ID NO: 11108 - RNA, 22 nt, Artificial Sequence
  SAMD9 targeting guide sequence portion
gacacacaugaagcauuugcug

SEQ ID NO: 11109 - RNA, 22 nt, Artificial Sequence
  SAMD9 targeting guide sequence portion
gaccugaaaaacagcaaaugcu

SEQ ID NO: 11110 - RNA, 22 nt, Artificial Sequence
  SAMD9 targeting guide sequence portion
gagacacacaugaagcauuugc

SEQ ID NO: 11111 - RNA, 22 nt, Artificial Sequence
  SAMD9 targeting guide sequence portion
gcaaaugcuucaugugugucuc

SEQ ID NO: 11112 - RNA, 22 nt, Artificial Sequence
  SAMD9 targeting guide sequence portion
gcuucaugugugucucaugaau

SEQ ID NO: 11113 - RNA, 22 nt, Artificial Sequence
  SAMD9 targeting guide sequence portion
guaaauauucaugagacacaca

SEQ ID NO: 11114 - RNA, 22 nt, Artificial Sequence
  SAMD9 targeting guide sequence portion
uaaauauucaugagacacacau

SEQ ID NO: 11115 - RNA, 22 nt, Artificial Sequence
  SAMD9 targeting guide sequence portion
uagaccugaaaaacagcaaaug

SEQ ID NO: 11116 - RNA, 22 nt, Artificial Sequence
  SAMD9 targeting guide sequence portion
uaguaaauauucaugagacaca

SEQ ID NO: 11117 - RNA, 22 nt, Artificial Sequence
  SAMD9 targeting guide sequence portion
uauucaugagacacacaugaag

SEQ ID NO: 11118 - RNA, 22 nt, Artificial Sequence
  SAMD9 targeting guide sequence portion
ucaugagacacacaugaagcau

SEQ ID NO: 11119 - RNA, 22 nt, Artificial Sequence
  SAMD9 targeting guide sequence portion
ucaugugugucucaugaauauu

SEQ ID NO: 11120 - RNA, 22 nt, Artificial Sequence
  SAMD9 targeting guide sequence portion
ugaaaaacagcaaaugcuucau

SEQ ID NO: 11121 - RNA, 22 nt, Artificial Sequence
  SAMD9 targeting guide sequence portion
ugagacacacaugaagcauuug

SEQ ID NO: 11122 - RNA, 22 nt, Artificial Sequence
  SAMD9 targeting guide sequence portion
ugcuucaugugugucucaugaa

SEQ ID NO: 11123 - RNA, 22 nt, Artificial Sequence
  SAMD9 targeting guide sequence portion
ugugugucucaugaauauuuac

SEQ ID NO: 11124 - RNA, 22 nt, Artificial Sequence
  SAMD9 targeting guide sequence portion
uucaugagacacacaugaagca

SEQ ID NO: 11125 - RNA, 22 nt, Artificial Sequence
  SAMD9 targeting guide sequence portion
uucaugugugucucaugaauau

SEQ ID NO: 11126 - RNA, 20 nt, Artificial Sequence
  SAMD9 targeting guide sequence portion
aaaaacagcaaaugcuucac

SEQ ID NO: 11127 - RNA, 20 nt, Artificial Sequence
  SAMD9 targeting guide sequence portion
aaaacagcaaaugcuucacg

SEQ ID NO: 11128 - RNA, 20 nt, Artificial Sequence
  SAMD9 targeting guide sequence portion
aaacagcaaaugcuucacgu

SEQ ID NO: 11129 - RNA, 20 nt, Artificial Sequence
  SAMD9 targeting guide sequence portion
aaauauucaugagacacacg

SEQ ID NO: 11130 - RNA, 20 nt, Artificial Sequence
  SAMD9 targeting guide sequence portion
aaaugcuucacgugugucuc

SEQ ID NO: 11131 - RNA, 20 nt, Artificial Sequence
  SAMD9 targeting guide sequence portion
aacagcaaaugcuucacgug

SEQ ID NO: 11132 - RNA, 20 nt, Artificial Sequence
  SAMD9 targeting guide sequence portion
aauauucaugagacacacgu

SEQ ID NO: 11133 - RNA, 20 nt, Artificial Sequence
  SAMD9 targeting guide sequence portion
aaugcuucacgugugucuca

SEQ ID NO: 11134 - RNA, 20 nt, Artificial Sequence
  SAMD9 targeting guide sequence portion
acacacgugaagcauuugcu

SEQ ID NO: 11135 - RNA, 20 nt, Artificial Sequence
  SAMD9 targeting guide sequence portion
acacgugaagcauuugcugu

SEQ ID NO: 11136 - RNA, 20 nt, Artificial Sequence
  SAMD9 targeting guide sequence portion
acagcaaaugcuucacgugu

SEQ ID NO: 11137 - RNA, 20 nt, Artificial Sequence
  SAMD9 targeting guide sequence portion
acgugaagcauuugcuguuu

SEQ ID NO: 11138 - RNA, 20 nt, Artificial Sequence
  SAMD9 targeting guide sequence portion
acgugugucucaugaauauu

SEQ ID NO: 11139 - RNA, 20 nt, Artificial Sequence
  SAMD9 targeting guide sequence portion
agacacacgugaagcauuug

SEQ ID NO: 11140 - RNA, 20 nt, Artificial Sequence
  SAMD9 targeting guide sequence portion
agcaaaugcuucacgugugu

SEQ ID NO: 11141 - RNA, 20 nt, Artificial Sequence
  SAMD9 targeting guide sequence portion
auauucaugagacacacgug

SEQ ID NO: 11142 - RNA, 20 nt, Artificial Sequence
  SAMD9 targeting guide sequence portion
augagacacacgugaagcau

SEQ ID NO: 11143 - RNA, 20 nt, Artificial Sequence
  SAMD9 targeting guide sequence portion
augcuucacgugugucucau

SEQ ID NO: 11144 - RNA, 20 nt, Artificial Sequence
  SAMD9 targeting guide sequence portion
auucaugagacacacgugaa

SEQ ID NO: 11145 - RNA, 20 nt, Artificial Sequence
  SAMD9 targeting guide sequence portion
caaaugcuucacgugugucu

SEQ ID NO: 11146 - RNA, 20 nt, Artificial Sequence
  SAMD9 targeting guide sequence portion
cacacgugaagcauuugcug

SEQ ID NO: 11147 - RNA, 20 nt, Artificial Sequence
  SAMD9 targeting guide sequence portion
cacgugaagcauuugcuguu

SEQ ID NO: 11148 - RNA, 20 nt, Artificial Sequence
  SAMD9 targeting guide sequence portion
cacgugugucucaugaauau

SEQ ID NO: 11149 - RNA, 20 nt, Artificial Sequence
  SAMD9 targeting guide sequence portion
cagcaaaugcuucacgugug

SEQ ID NO: 11150 - RNA, 20 nt, Artificial Sequence
  SAMD9 targeting guide sequence portion
caugagacacacgugaagca

SEQ ID NO: 11151 - RNA, 20 nt, Artificial Sequence
  SAMD9 targeting guide sequence portion
cgugaagcauuugcuguuuu

SEQ ID NO: 11152 - RNA, 20 nt, Artificial Sequence
  SAMD9 targeting guide sequence portion
cgugugucucaugaauauuu

SEQ ID NO: 11153 - RNA, 20 nt, Artificial Sequence
  SAMD9 targeting guide sequence portion
cuucacgugugucucaugaa

SEQ ID NO: 11154 - RNA, 20 nt, Artificial Sequence
  SAMD9 targeting guide sequence portion
gacacacgugaagcauuugc

SEQ ID NO: 11155 - RNA, 20 nt, Artificial Sequence
  SAMD9 targeting guide sequence portion
gagacacacgugaagcauuu

SEQ ID NO: 11156 - RNA, 20 nt, Artificial Sequence
  SAMD9 targeting guide sequence portion
gcaaaugcuucacguguguc

SEQ ID NO: 11157 - RNA, 20 nt, Artificial Sequence
  SAMD9 targeting guide sequence portion
gcuucacgugugucucauga

SEQ ID NO: 11158 - RNA, 20 nt, Artificial Sequence
  SAMD9 targeting guide sequence portion
gugaagcauuugcuguuuuu

SEQ ID NO: 11159 - RNA, 20 nt, Artificial Sequence
  SAMD9 targeting guide sequence portion
uauucaugagacacacguga

SEQ ID NO: 11160 - RNA, 20 nt, Artificial Sequence
  SAMD9 targeting guide sequence portion
ucacgugugucucaugaaua

SEQ ID NO: 11161 - RNA, 20 nt, Artificial Sequence
  SAMD9 targeting guide sequence portion
ucaugagacacacgugaagc

SEQ ID NO: 11162 - RNA, 20 nt, Artificial Sequence
  SAMD9 targeting guide sequence portion
ugagacacacgugaagcauu

SEQ ID NO: 11163 - RNA, 20 nt, Artificial Sequence
  SAMD9 targeting guide sequence portion
ugcuucacgugugucucaug

SEQ ID NO: 11164 - RNA, 20 nt, Artificial Sequence
  SAMD9 targeting guide sequence portion
uucacgugugucucaugaau

SEQ ID NO: 11165 - RNA, 20 nt, Artificial Sequence
  SAMD9 targeting guide sequence portion
uucaugagacacacgugaag

SEQ ID NO: 11166 - RNA, 21 nt, Artificial Sequence
  SAMD9 targeting guide sequence portion
aaaaacagcaaaugcuucacg

SEQ ID NO: 11167 - RNA, 21 nt, Artificial Sequence
  SAMD9 targeting guide sequence portion
aaaacagcaaaugcuucacgu

SEQ ID NO: 11168 - RNA, 21 nt, Artificial Sequence
  SAMD9 targeting guide sequence portion
aaacagcaaaugcuucacgug

SEQ ID NO: 11169 - RNA, 21 nt, Artificial Sequence
  SAMD9 targeting guide sequence portion
aaauauucaugagacacacgu

SEQ ID NO: 11170 - RNA, 21 nt, Artificial Sequence
  SAMD9 targeting guide sequence portion
aaaugcuucacgugugucuca

SEQ ID NO: 11171 - RNA, 21 nt, Artificial Sequence
  SAMD9 targeting guide sequence portion
aacagcaaaugcuucacgugu

SEQ ID NO: 11172 - RNA, 21 nt, Artificial Sequence
  SAMD9 targeting guide sequence portion
aauauucaugagacacacgug

SEQ ID NO: 11173 - RNA, 21 nt, Artificial Sequence
  SAMD9 targeting guide sequence portion
aaugcuucacgugugucucau

SEQ ID NO: 11174 - RNA, 21 nt, Artificial Sequence
  SAMD9 targeting guide sequence portion
acacacgugaagcauuugcug

SEQ ID NO: 11175 - RNA, 21 nt, Artificial Sequence
  SAMD9 targeting guide sequence portion
acacgugaagcauuugcuguu

SEQ ID NO: 11176 - RNA, 21 nt, Artificial Sequence
  SAMD9 targeting guide sequence portion
acagcaaaugcuucacgugug

SEQ ID NO: 11177 - RNA, 21 nt, Artificial Sequence
  SAMD9 targeting guide sequence portion
acgugaagcauuugcuguuuu

SEQ ID NO: 11178 - RNA, 21 nt, Artificial Sequence
  SAMD9 targeting guide sequence portion
acgugugucucaugaauauuu

SEQ ID NO: 11179 - RNA, 21 nt, Artificial Sequence
  SAMD9 targeting guide sequence portion
agacacacgugaagcauuugc

SEQ ID NO: 11180 - RNA, 21 nt, Artificial Sequence
  SAMD9 targeting guide sequence portion
agcaaaugcuucacguguguc

SEQ ID NO: 11181 - RNA, 21 nt, Artificial Sequence
  SAMD9 targeting guide sequence portion
auauucaugagacacacguga

SEQ ID NO: 11182 - RNA, 21 nt, Artificial Sequence
  SAMD9 targeting guide sequence portion
augagacacacgugaagcauu

SEQ ID NO: 11183 - RNA, 21 nt, Artificial Sequence
  SAMD9 targeting guide sequence portion
augcuucacgugugucucaug

SEQ ID NO: 11184 - RNA, 21 nt, Artificial Sequence
  SAMD9 targeting guide sequence portion
auucaugagacacacgugaag

SEQ ID NO: 11185 - RNA, 21 nt, Artificial Sequence
  SAMD9 targeting guide sequence portion
caaaugcuucacgugugucuc

SEQ ID NO: 11186 - RNA, 21 nt, Artificial Sequence
  SAMD9 targeting guide sequence portion
cacacgugaagcauuugcugu

SEQ ID NO: 11187 - RNA, 21 nt, Artificial Sequence
  SAMD9 targeting guide sequence portion
cacgugaagcauuugcuguuu

SEQ ID NO: 11188 - RNA, 21 nt, Artificial Sequence
  SAMD9 targeting guide sequence portion
cacgugugucucaugaauauu

SEQ ID NO: 11189 - RNA, 21 nt, Artificial Sequence
  SAMD9 targeting guide sequence portion
cagcaaaugcuucacgugugu

SEQ ID NO: 11190 - RNA, 21 nt, Artificial Sequence
  SAMD9 targeting guide sequence portion
caugagacacacgugaagcau

SEQ ID NO: 11191 - RNA, 21 nt, Artificial Sequence
  SAMD9 targeting guide sequence portion
cgugaagcauuugcuguuuuu

SEQ ID NO: 11192 - RNA, 21 nt, Artificial Sequence
  SAMD9 targeting guide sequence portion
cgugugucucaugaauauuua

SEQ ID NO: 11193 - RNA, 21 nt, Artificial Sequence
  SAMD9 targeting guide sequence portion
cuucacgugugucucaugaau

SEQ ID NO: 11194 - RNA, 21 nt, Artificial Sequence
  SAMD9 targeting guide sequence portion
gaaaaacagcaaaugcuucac

SEQ ID NO: 11195 - RNA, 21 nt, Artificial Sequence
  SAMD9 targeting guide sequence portion
gacacacgugaagcauuugcu

SEQ ID NO: 11196 - RNA, 21 nt, Artificial Sequence
  SAMD9 targeting guide sequence portion
gagacacacgugaagcauuug

SEQ ID NO: 11197 - RNA, 21 nt, Artificial Sequence
  SAMD9 targeting guide sequence portion
gcaaaugcuucacgugugucu

SEQ ID NO: 11198 - RNA, 21 nt, Artificial Sequence
  SAMD9 targeting guide sequence portion
gcuucacgugugucucaugaa

SEQ ID NO: 11199 - RNA, 21 nt, Artificial Sequence
  SAMD9 targeting guide sequence portion
gugaagcauuugcuguuuuuc

SEQ ID NO: 11200 - RNA, 21 nt, Artificial Sequence
  SAMD9 targeting guide sequence portion
uaaauauucaugagacacacg

SEQ ID NO: 11201 - RNA, 21 nt, Artificial Sequence
  SAMD9 targeting guide sequence portion
uauucaugagacacacgugaa

SEQ ID NO: 11202 - RNA, 21 nt, Artificial Sequence
  SAMD9 targeting guide sequence portion
ucacgugugucucaugaauau

SEQ ID NO: 11203 - RNA, 21 nt, Artificial Sequence
  SAMD9 targeting guide sequence portion
ucaugagacacacgugaagca

SEQ ID NO: 11204 - RNA, 21 nt, Artificial Sequence
  SAMD9 targeting guide sequence portion
ugagacacacgugaagcauuu

SEQ ID NO: 11205 - RNA, 21 nt, Artificial Sequence
  SAMD9 targeting guide sequence portion
ugcuucacgugugucucauga

SEQ ID NO: 11206 - RNA, 21 nt, Artificial Sequence
  SAMD9 targeting guide sequence portion
uucacgugugucucaugaaua

SEQ ID NO: 11207 - RNA, 21 nt, Artificial Sequence
  SAMD9 targeting guide sequence portion
uucaugagacacacgugaagc

SEQ ID NO: 11208 - RNA, 22 nt, Artificial Sequence
  SAMD9 targeting guide sequence portion
aaaaacagcaaaugcuucacgu

SEQ ID NO: 11209 - RNA, 22 nt, Artificial Sequence
  SAMD9 targeting guide sequence portion
aaaacagcaaaugcuucacgug

SEQ ID NO: 11210 - RNA, 22 nt, Artificial Sequence
  SAMD9 targeting guide sequence portion
aaacagcaaaugcuucacgugu

SEQ ID NO: 11211 - RNA, 22 nt, Artificial Sequence
  SAMD9 targeting guide sequence portion
aaauauucaugagacacacgug

SEQ ID NO: 11212 - RNA, 22 nt, Artificial Sequence
  SAMD9 targeting guide sequence portion
aaaugcuucacgugugucucau

SEQ ID NO: 11213 - RNA, 22 nt, Artificial Sequence
  SAMD9 targeting guide sequence portion
aacagcaaaugcuucacgugug

SEQ ID NO: 11214 - RNA, 22 nt, Artificial Sequence
  SAMD9 targeting guide sequence portion
aauauucaugagacacacguga

SEQ ID NO: 11215 - RNA, 22 nt, Artificial Sequence
  SAMD9 targeting guide sequence portion
aaugcuucacgugugucucaug

SEQ ID NO: 11216 - RNA, 22 nt, Artificial Sequence
  SAMD9 targeting guide sequence portion
acacacgugaagcauuugcugu

SEQ ID NO: 11217 - RNA, 22 nt, Artificial Sequence
  SAMD9 targeting guide sequence portion
acacgugaagcauuugcuguuu

SEQ ID NO: 11218 - RNA, 22 nt, Artificial Sequence
  SAMD9 targeting guide sequence portion
acagcaaaugcuucacgugugu

SEQ ID NO: 11219 - RNA, 22 nt, Artificial Sequence
  SAMD9 targeting guide sequence portion
acgugaagcauuugcuguuuuu

SEQ ID NO: 11220 - RNA, 22 nt, Artificial Sequence
  SAMD9 targeting guide sequence portion
acgugugucucaugaauauuua

SEQ ID NO: 11221 - RNA, 22 nt, Artificial Sequence
  SAMD9 targeting guide sequence portion
agacacacgugaagcauuugcu

SEQ ID NO: 11222 - RNA, 22 nt, Artificial Sequence
  SAMD9 targeting guide sequence portion
agcaaaugcuucacgugugucu

SEQ ID NO: 11223 - RNA, 22 nt, Artificial Sequence
  SAMD9 targeting guide sequence portion
auauucaugagacacacgugaa

SEQ ID NO: 11224 - RNA, 22 nt, Artificial Sequence
  SAMD9 targeting guide sequence portion
augagacacacgugaagcauuu

SEQ ID NO: 11225 - RNA, 22 nt, Artificial Sequence
  SAMD9 targeting guide sequence portion
augcuucacgugugucucauga

SEQ ID NO: 11226 - RNA, 22 nt, Artificial Sequence
  SAMD9 targeting guide sequence portion
auucaugagacacacgugaagc

SEQ ID NO: 11227 - RNA, 22 nt, Artificial Sequence
  SAMD9 targeting guide sequence portion
caaaugcuucacgugugucuca

SEQ ID NO: 11228 - RNA, 22 nt, Artificial Sequence
  SAMD9 targeting guide sequence portion
cacacgugaagcauuugcuguu

SEQ ID NO: 11229 - RNA, 22 nt, Artificial Sequence
  SAMD9 targeting guide sequence portion
cacgugaagcauuugcuguuuu

SEQ ID NO: 11230 - RNA, 22 nt, Artificial Sequence
  SAMD9 targeting guide sequence portion
cacgugugucucaugaauauuu

SEQ ID NO: 11231 - RNA, 22 nt, Artificial Sequence
  SAMD9 targeting guide sequence portion
cagcaaaugcuucacguguguc

SEQ ID NO: 11232 - RNA, 22 nt, Artificial Sequence
  SAMD9 targeting guide sequence portion
caugagacacacgugaagcauu

SEQ ID NO: 11233 - RNA, 22 nt, Artificial Sequence
  SAMD9 targeting guide sequence portion
cgugaagcauuugcuguuuuuc

SEQ ID NO: 11234 - RNA, 22 nt, Artificial Sequence
  SAMD9 targeting guide sequence portion
cgugugucucaugaauauuuac

SEQ ID NO: 11235 - RNA, 22 nt, Artificial Sequence
  SAMD9 targeting guide sequence portion
cuucacgugugucucaugaaua

SEQ ID NO: 11236 - RNA, 22 nt, Artificial Sequence
  SAMD9 targeting guide sequence portion
gaaaaacagcaaaugcuucacg

SEQ ID NO: 11237 - RNA, 22 nt, Artificial Sequence
  SAMD9 targeting guide sequence portion
gacacacgugaagcauuugcug

SEQ ID NO: 11238 - RNA, 22 nt, Artificial Sequence
  SAMD9 targeting guide sequence portion
gagacacacgugaagcauuugc

SEQ ID NO: 11239 - RNA, 22 nt, Artificial Sequence
  SAMD9 targeting guide sequence portion
gcaaaugcuucacgugugucuc

SEQ ID NO: 11240 - RNA, 22 nt, Artificial Sequence
  SAMD9 targeting guide sequence portion
gcuucacgugugucucaugaau

SEQ ID NO: 11241 - RNA, 22 nt, Artificial Sequence
  SAMD9 targeting guide sequence portion
guaaauauucaugagacacacg

SEQ ID NO: 11242 - RNA, 22 nt, Artificial Sequence
  SAMD9 targeting guide sequence portion
gugaagcauuugcuguuuuuca

SEQ ID NO: 11243 - RNA, 22 nt, Artificial Sequence
  SAMD9 targeting guide sequence portion
uaaauauucaugagacacacgu

SEQ ID NO: 11244 - RNA, 22 nt, Artificial Sequence
  SAMD9 targeting guide sequence portion
uauucaugagacacacgugaag

SEQ ID NO: 11245 - RNA, 22 nt, Artificial Sequence
  SAMD9 targeting guide sequence portion
ucacgugugucucaugaauauu

SEQ ID NO: 11246 - RNA, 22 nt, Artificial Sequence
  SAMD9 targeting guide sequence portion
ucaugagacacacgugaagcau

SEQ ID NO: 11247 - RNA, 22 nt, Artificial Sequence
  SAMD9 targeting guide sequence portion
ugaaaaacagcaaaugcuucac

SEQ ID NO: 11248 - RNA, 22 nt, Artificial Sequence
  SAMD9 targeting guide sequence portion
ugagacacacgugaagcauuug

SEQ ID NO: 11249 - RNA, 22 nt, Artificial Sequence
  SAMD9 targeting guide sequence portion
ugcuucacgugugucucaugaa

SEQ ID NO: 11250 - RNA, 22 nt, Artificial Sequence
  SAMD9 targeting guide sequence portion
uucacgugugucucaugaauau

SEQ ID NO: 11251 - RNA, 22 nt, Artificial Sequence
  SAMD9 targeting guide sequence portion
uucaugagacacacgugaagca

SEQ ID NO: 11252 - RNA, 20 nt, Artificial Sequence
  SAMD9 targeting guide sequence portion
aaacagaccucaacucuguu

SEQ ID NO: 11253 - RNA, 20 nt, Artificial Sequence
  SAMD9 targeting guide sequence portion
aaacagaguugaggucuguu

SEQ ID NO: 11254 - RNA, 20 nt, Artificial Sequence
  SAMD9 targeting guide sequence portion
aacagaccucaacucuguuu

SEQ ID NO: 11255 - RNA, 20 nt, Artificial Sequence
  SAMD9 targeting guide sequence portion
aacagaguugaggucuguuu

SEQ ID NO: 11256 - RNA, 20 nt, Artificial Sequence
  SAMD9 targeting guide sequence portion
aagacccuuuaaacagaccu

SEQ ID NO: 11257 - RNA, 20 nt, Artificial Sequence
  SAMD9 targeting guide sequence portion
acagaguugaggucuguuua

SEQ ID NO: 11258 - RNA, 20 nt, Artificial Sequence
  SAMD9 targeting guide sequence portion
acccuuuaaacagaccucaa

SEQ ID NO: 11259 - RNA, 20 nt, Artificial Sequence
  SAMD9 targeting guide sequence portion
agaaacagaguugaggucug

SEQ ID NO: 11260 - RNA, 20 nt, Artificial Sequence
  SAMD9 targeting guide sequence portion
agacccuuuaaacagaccuc

SEQ ID NO: 11261 - RNA, 20 nt, Artificial Sequence
  SAMD9 targeting guide sequence portion
agaguugaggucuguuuaaa

SEQ ID NO: 11262 - RNA, 20 nt, Artificial Sequence
  SAMD9 targeting guide sequence portion
aggucuguuuaaagggucuu

SEQ ID NO: 11263 - RNA, 20 nt, Artificial Sequence
  SAMD9 targeting guide sequence portion
aguugaggucuguuuaaagg

SEQ ID NO: 11264 - RNA, 20 nt, Artificial Sequence
  SAMD9 targeting guide sequence portion
aucugccaagacccuuuaaa

SEQ ID NO: 11265 - RNA, 20 nt, Artificial Sequence
  SAMD9 targeting guide sequence portion
caagacccuuuaaacagacc

SEQ ID NO: 11266 - RNA, 20 nt, Artificial Sequence
  SAMD9 targeting guide sequence portion
cagaguugaggucuguuuaa

SEQ ID NO: 11267 - RNA, 20 nt, Artificial Sequence
  SAMD9 targeting guide sequence portion
caucugccaagacccuuuaa

SEQ ID NO: 11268 - RNA, 20 nt, Artificial Sequence
  SAMD9 targeting guide sequence portion
ccaagacccuuuaaacagac

SEQ ID NO: 11269 - RNA, 20 nt, Artificial Sequence
  SAMD9 targeting guide sequence portion
ccaucugccaagacccuuua

SEQ ID NO: 11270 - RNA, 20 nt, Artificial Sequence
  SAMD9 targeting guide sequence portion
cccuuuaaacagaccucaac

SEQ ID NO: 11271 - RNA, 20 nt, Artificial Sequence
  SAMD9 targeting guide sequence portion
ccuuuaaacagaccucaacu

SEQ ID NO: 11272 - RNA, 20 nt, Artificial Sequence
  SAMD9 targeting guide sequence portion
cucuuccaucugccaagacc

SEQ ID NO: 11273 - RNA, 20 nt, Artificial Sequence
  SAMD9 targeting guide sequence portion
cugccaagacccuuuaaaca

SEQ ID NO: 11274 - RNA, 20 nt, Artificial Sequence
  SAMD9 targeting guide sequence portion
cuguuuaaagggucuuggca

SEQ ID NO: 11275 - RNA, 20 nt, Artificial Sequence
  SAMD9 targeting guide sequence portion
cuuccaucugccaagacccu

SEQ ID NO: 11276 - RNA, 20 nt, Artificial Sequence
  SAMD9 targeting guide sequence portion
cuuuaaacagaccucaacuc

SEQ ID NO: 11277 - RNA, 20 nt, Artificial Sequence
  SAMD9 targeting guide sequence portion
gaaacagaguugaggucugu

SEQ ID NO: 11278 - RNA, 20 nt, Artificial Sequence
  SAMD9 targeting guide sequence portion
gacccuuuaaacagaccuca

SEQ ID NO: 11279 - RNA, 20 nt, Artificial Sequence
  SAMD9 targeting guide sequence portion
gagaaacagaguugaggucu

SEQ ID NO: 11280 - RNA, 20 nt, Artificial Sequence
  SAMD9 targeting guide sequence portion
gaggucuguuuaaagggucu

SEQ ID NO: 11281 - RNA, 20 nt, Artificial Sequence
  SAMD9 targeting guide sequence portion
gaguugaggucuguuuaaag

SEQ ID NO: 11282 - RNA, 20 nt, Artificial Sequence
  SAMD9 targeting guide sequence portion
gccaagacccuuuaaacaga

SEQ ID NO: 11283 - RNA, 20 nt, Artificial Sequence
  SAMD9 targeting guide sequence portion
ggucuguuuaaagggucuug

SEQ ID NO: 11284 - RNA, 20 nt, Artificial Sequence
  SAMD9 targeting guide sequence portion
gucuguuuaaagggucuugg

SEQ ID NO: 11285 - RNA, 20 nt, Artificial Sequence
  SAMD9 targeting guide sequence portion
guugaggucuguuuaaaggg

SEQ ID NO: 11286 - RNA, 20 nt, Artificial Sequence
  SAMD9 targeting guide sequence portion
guuuaaagggucuuggcaga

SEQ ID NO: 11287 - RNA, 20 nt, Artificial Sequence
  SAMD9 targeting guide sequence portion
uaaacagaccucaacucugu

SEQ ID NO: 11288 - RNA, 20 nt, Artificial Sequence
  SAMD9 targeting guide sequence portion
uccaucugccaagacccuuu

SEQ ID NO: 11289 - RNA, 20 nt, Artificial Sequence
  SAMD9 targeting guide sequence portion
ucugccaagacccuuuaaac

SEQ ID NO: 11290 - RNA, 20 nt, Artificial Sequence
  SAMD9 targeting guide sequence portion
ucuguuuaaagggucuuggc

SEQ ID NO: 11291 - RNA, 20 nt, Artificial Sequence
  SAMD9 targeting guide sequence portion
ucuuccaucugccaagaccc

SEQ ID NO: 11292 - RNA, 20 nt, Artificial Sequence
  SAMD9 targeting guide sequence portion
ugagaaacagaguugagguc

SEQ ID NO: 11293 - RNA, 20 nt, Artificial Sequence
  SAMD9 targeting guide sequence portion
ugaggucuguuuaaaggguc

SEQ ID NO: 11294 - RNA, 20 nt, Artificial Sequence
  SAMD9 targeting guide sequence portion
ugccaagacccuuuaaacag

SEQ ID NO: 11295 - RNA, 20 nt, Artificial Sequence
  SAMD9 targeting guide sequence portion
uguuuaaagggucuuggcag

SEQ ID NO: 11296 - RNA, 20 nt, Artificial Sequence
  SAMD9 targeting guide sequence portion
uuaaacagaccucaacucug

SEQ ID NO: 11297 - RNA, 20 nt, Artificial Sequence
  SAMD9 targeting guide sequence portion
uuaaagggucuuggcagaug

SEQ ID NO: 11298 - RNA, 20 nt, Artificial Sequence
  SAMD9 targeting guide sequence portion
uuccaucugccaagacccuu

SEQ ID NO: 11299 - RNA, 20 nt, Artificial Sequence
  SAMD9 targeting guide sequence portion
uugagaaacagaguugaggu

SEQ ID NO: 11300 - RNA, 20 nt, Artificial Sequence
  SAMD9 targeting guide sequence portion
uugaggucuguuuaaagggu

SEQ ID NO: 11301 - RNA, 20 nt, Artificial Sequence
  SAMD9 targeting guide sequence portion
uuuaaacagaccucaacucu

SEQ ID NO: 11302 - RNA, 20 nt, Artificial Sequence
  SAMD9 targeting guide sequence portion
uuuaaagggucuuggcagau

SEQ ID NO: 11303 - RNA, 20 nt, Artificial Sequence
  SAMD9 targeting guide sequence portion
uuugagaaacagaguugagg

SEQ ID NO: 11304 - RNA, 21 nt, Artificial Sequence
  SAMD9 targeting guide sequence portion
aaacagaccucaacucuguuu

SEQ ID NO: 11305 - RNA, 21 nt, Artificial Sequence
  SAMD9 targeting guide sequence portion
aaacagaguugaggucuguuu

SEQ ID NO: 11306 - RNA, 21 nt, Artificial Sequence
  SAMD9 targeting guide sequence portion
aacagaccucaacucuguuuc

SEQ ID NO: 11307 - RNA, 21 nt, Artificial Sequence
  SAMD9 targeting guide sequence portion
aacagaguugaggucuguuua

SEQ ID NO: 11308 - RNA, 21 nt, Artificial Sequence
  SAMD9 targeting guide sequence portion
aagacccuuuaaacagaccuc

SEQ ID NO: 11309 - RNA, 21 nt, Artificial Sequence
  SAMD9 targeting guide sequence portion
acagaguugaggucuguuuaa

SEQ ID NO: 11310 - RNA, 21 nt, Artificial Sequence
  SAMD9 targeting guide sequence portion
acccuuuaaacagaccucaac

SEQ ID NO: 11311 - RNA, 21 nt, Artificial Sequence
  SAMD9 targeting guide sequence portion
agaaacagaguugaggucugu

SEQ ID NO: 11312 - RNA, 21 nt, Artificial Sequence
  SAMD9 targeting guide sequence portion
agacccuuuaaacagaccuca

SEQ ID NO: 11313 - RNA, 21 nt, Artificial Sequence
  SAMD9 targeting guide sequence portion
agaguugaggucuguuuaaag

SEQ ID NO: 11314 - RNA, 21 nt, Artificial Sequence
  SAMD9 targeting guide sequence portion
aggucuguuuaaagggucuug

SEQ ID NO: 11315 - RNA, 21 nt, Artificial Sequence
  SAMD9 targeting guide sequence portion
aguugaggucuguuuaaaggg

SEQ ID NO: 11316 - RNA, 21 nt, Artificial Sequence
  SAMD9 targeting guide sequence portion
aucugccaagacccuuuaaac

SEQ ID NO: 11317 - RNA, 21 nt, Artificial Sequence
  SAMD9 targeting guide sequence portion
caagacccuuuaaacagaccu

SEQ ID NO: 11318 - RNA, 21 nt, Artificial Sequence
  SAMD9 targeting guide sequence portion
cagaguugaggucuguuuaaa

SEQ ID NO: 11319 - RNA, 21 nt, Artificial Sequence
  SAMD9 targeting guide sequence portion
caucugccaagacccuuuaaa

SEQ ID NO: 11320 - RNA, 21 nt, Artificial Sequence
  SAMD9 targeting guide sequence portion
ccaagacccuuuaaacagacc

SEQ ID NO: 11321 - RNA, 21 nt, Artificial Sequence
  SAMD9 targeting guide sequence portion
ccaucugccaagacccuuuaa

SEQ ID NO: 11322 - RNA, 21 nt, Artificial Sequence
  SAMD9 targeting guide sequence portion
cccuuuaaacagaccucaacu

SEQ ID NO: 11323 - RNA, 21 nt, Artificial Sequence
  SAMD9 targeting guide sequence portion
ccucuuccaucugccaagacc

SEQ ID NO: 11324 - RNA, 21 nt, Artificial Sequence
  SAMD9 targeting guide sequence portion
ccuuuaaacagaccucaacuc

SEQ ID NO: 11325 - RNA, 21 nt, Artificial Sequence
  SAMD9 targeting guide sequence portion
cucuuccaucugccaagaccc

SEQ ID NO: 11326 - RNA, 21 nt, Artificial Sequence
  SAMD9 targeting guide sequence portion
cugccaagacccuuuaaacag

SEQ ID NO: 11327 - RNA, 21 nt, Artificial Sequence
  SAMD9 targeting guide sequence portion
cuguuuaaagggucuuggcag

SEQ ID NO: 11328 - RNA, 21 nt, Artificial Sequence
  SAMD9 targeting guide sequence portion
cuuccaucugccaagacccuu

SEQ ID NO: 11329 - RNA, 21 nt, Artificial Sequence
  SAMD9 targeting guide sequence portion
cuuuaaacagaccucaacucu

SEQ ID NO: 11330 - RNA, 21 nt, Artificial Sequence
  SAMD9 targeting guide sequence portion
gaaacagaguugaggucuguu

SEQ ID NO: 11331 - RNA, 21 nt, Artificial Sequence
  SAMD9 targeting guide sequence portion
gacccuuuaaacagaccucaa

SEQ ID NO: 11332 - RNA, 21 nt, Artificial Sequence
  SAMD9 targeting guide sequence portion
gagaaacagaguugaggucug

SEQ ID NO: 11333 - RNA, 21 nt, Artificial Sequence
  SAMD9 targeting guide sequence portion
gaggucuguuuaaagggucuu

SEQ ID NO: 11334 - RNA, 21 nt, Artificial Sequence
  SAMD9 targeting guide sequence portion
gaguugaggucuguuuaaagg

SEQ ID NO: 11335 - RNA, 21 nt, Artificial Sequence
  SAMD9 targeting guide sequence portion
gccaagacccuuuaaacagac

SEQ ID NO: 11336 - RNA, 21 nt, Artificial Sequence
  SAMD9 targeting guide sequence portion
ggucuguuuaaagggucuugg

SEQ ID NO: 11337 - RNA, 21 nt, Artificial Sequence
  SAMD9 targeting guide sequence portion
gucuguuuaaagggucuuggc

SEQ ID NO: 11338 - RNA, 21 nt, Artificial Sequence
  SAMD9 targeting guide sequence portion
guugaggucuguuuaaagggu

SEQ ID NO: 11339 - RNA, 21 nt, Artificial Sequence
  SAMD9 targeting guide sequence portion
guuuaaagggucuuggcagau

SEQ ID NO: 11340 - RNA, 21 nt, Artificial Sequence
  SAMD9 targeting guide sequence portion
uaaacagaccucaacucuguu

SEQ ID NO: 11341 - RNA, 21 nt, Artificial Sequence
  SAMD9 targeting guide sequence portion
uccaucugccaagacccuuua

SEQ ID NO: 11342 - RNA, 21 nt, Artificial Sequence
  SAMD9 targeting guide sequence portion
ucugccaagacccuuuaaaca

SEQ ID NO: 11343 - RNA, 21 nt, Artificial Sequence
  SAMD9 targeting guide sequence portion
ucuguuuaaagggucuuggca

SEQ ID NO: 11344 - RNA, 21 nt, Artificial Sequence
  SAMD9 targeting guide sequence portion
ucuuccaucugccaagacccu

SEQ ID NO: 11345 - RNA, 21 nt, Artificial Sequence
  SAMD9 targeting guide sequence portion
ugagaaacagaguugaggucu

SEQ ID NO: 11346 - RNA, 21 nt, Artificial Sequence
  SAMD9 targeting guide sequence portion
ugaggucuguuuaaagggucu

SEQ ID NO: 11347 - RNA, 21 nt, Artificial Sequence
  SAMD9 targeting guide sequence portion
ugccaagacccuuuaaacaga

SEQ ID NO: 11348 - RNA, 21 nt, Artificial Sequence
  SAMD9 targeting guide sequence portion
uguuuaaagggucuuggcaga

SEQ ID NO: 11349 - RNA, 21 nt, Artificial Sequence
  SAMD9 targeting guide sequence portion
uuaaacagaccucaacucugu

SEQ ID NO: 11350 - RNA, 21 nt, Artificial Sequence
  SAMD9 targeting guide sequence portion
uuaaagggucuuggcagaugg

SEQ ID NO: 11351 - RNA, 21 nt, Artificial Sequence
  SAMD9 targeting guide sequence portion
uuccaucugccaagacccuuu

SEQ ID NO: 11352 - RNA, 21 nt, Artificial Sequence
  SAMD9 targeting guide sequence portion
uugagaaacagaguugagguc

SEQ ID NO: 11353 - RNA, 21 nt, Artificial Sequence
  SAMD9 targeting guide sequence portion
uugaggucuguuuaaaggguc

SEQ ID NO: 11354 - RNA, 21 nt, Artificial Sequence
  SAMD9 targeting guide sequence portion
uuuaaacagaccucaacucug

SEQ ID NO: 11355 - RNA, 21 nt, Artificial Sequence
  SAMD9 targeting guide sequence portion
uuuaaagggucuuggcagaug

SEQ ID NO: 11356 - RNA, 21 nt, Artificial Sequence
  SAMD9 targeting guide sequence portion
uuugagaaacagaguugaggu

SEQ ID NO: 11357 - RNA, 21 nt, Artificial Sequence
  SAMD9 targeting guide sequence portion
uuuugagaaacagaguugagg

SEQ ID NO: 11358 - RNA, 22 nt, Artificial Sequence
  SAMD9 targeting guide sequence portion
aaacagaccucaacucuguuuc

SEQ ID NO: 11359 - RNA, 22 nt, Artificial Sequence
  SAMD9 targeting guide sequence portion
aaacagaguugaggucuguuua

SEQ ID NO: 11360 - RNA, 22 nt, Artificial Sequence
  SAMD9 targeting guide sequence portion
aacagaccucaacucuguuucu

SEQ ID NO: 11361 - RNA, 22 nt, Artificial Sequence
  SAMD9 targeting guide sequence portion
aacagaguugaggucuguuuaa

SEQ ID NO: 11362 - RNA, 22 nt, Artificial Sequence
  SAMD9 targeting guide sequence portion
aagacccuuuaaacagaccuca

SEQ ID NO: 11363 - RNA, 22 nt, Artificial Sequence
  SAMD9 targeting guide sequence portion
acagaguugaggucuguuuaaa

SEQ ID NO: 11364 - RNA, 22 nt, Artificial Sequence
  SAMD9 targeting guide sequence portion
acccuuuaaacagaccucaacu

SEQ ID NO: 11365 - RNA, 22 nt, Artificial Sequence
  SAMD9 targeting guide sequence portion
accucuuccaucugccaagacc

SEQ ID NO: 11366 - RNA, 22 nt, Artificial Sequence
  SAMD9 targeting guide sequence portion
agaaacagaguugaggucuguu

SEQ ID NO: 11367 - RNA, 22 nt, Artificial Sequence
  SAMD9 targeting guide sequence portion
agacccuuuaaacagaccucaa

SEQ ID NO: 11368 - RNA, 22 nt, Artificial Sequence
  SAMD9 targeting guide sequence portion
agaguugaggucuguuuaaagg

SEQ ID NO: 11369 - RNA, 22 nt, Artificial Sequence
  SAMD9 targeting guide sequence portion
aggucuguuuaaagggucuugg

SEQ ID NO: 11370 - RNA, 22 nt, Artificial Sequence
  SAMD9 targeting guide sequence portion
aguugaggucuguuuaaagggu

SEQ ID NO: 11371 - RNA, 22 nt, Artificial Sequence
  SAMD9 targeting guide sequence portion
aucugccaagacccuuuaaaca

SEQ ID NO: 11372 - RNA, 22 nt, Artificial Sequence
  SAMD9 targeting guide sequence portion
auuuugagaaacagaguugagg

SEQ ID NO: 11373 - RNA, 22 nt, Artificial Sequence
  SAMD9 targeting guide sequence portion
caagacccuuuaaacagaccuc

SEQ ID NO: 11374 - RNA, 22 nt, Artificial Sequence
  SAMD9 targeting guide sequence portion
cagaguugaggucuguuuaaag

SEQ ID NO: 11375 - RNA, 22 nt, Artificial Sequence
  SAMD9 targeting guide sequence portion
caucugccaagacccuuuaaac

SEQ ID NO: 11376 - RNA, 22 nt, Artificial Sequence
  SAMD9 targeting guide sequence portion
ccaagacccuuuaaacagaccu

SEQ ID NO: 11377 - RNA, 22 nt, Artificial Sequence
  SAMD9 targeting guide sequence portion
ccaucugccaagacccuuuaaa

SEQ ID NO: 11378 - RNA, 22 nt, Artificial Sequence
  SAMD9 targeting guide sequence portion
cccuuuaaacagaccucaacuc

SEQ ID NO: 11379 - RNA, 22 nt, Artificial Sequence
  SAMD9 targeting guide sequence portion
ccucuuccaucugccaagaccc

SEQ ID NO: 11380 - RNA, 22 nt, Artificial Sequence
  SAMD9 targeting guide sequence portion
ccuuuaaacagaccucaacucu

SEQ ID NO: 11381 - RNA, 22 nt, Artificial Sequence
  SAMD9 targeting guide sequence portion
cucuuccaucugccaagacccu

SEQ ID NO: 11382 - RNA, 22 nt, Artificial Sequence
  SAMD9 targeting guide sequence portion
cugccaagacccuuuaaacaga

SEQ ID NO: 11383 - RNA, 22 nt, Artificial Sequence
  SAMD9 targeting guide sequence portion
cuguuuaaagggucuuggcaga

SEQ ID NO: 11384 - RNA, 22 nt, Artificial Sequence
  SAMD9 targeting guide sequence portion
cuuccaucugccaagacccuuu

SEQ ID NO: 11385 - RNA, 22 nt, Artificial Sequence
  SAMD9 targeting guide sequence portion
cuuuaaacagaccucaacucug

SEQ ID NO: 11386 - RNA, 22 nt, Artificial Sequence
  SAMD9 targeting guide sequence portion
gaaacagaguugaggucuguuu

SEQ ID NO: 11387 - RNA, 22 nt, Artificial Sequence
  SAMD9 targeting guide sequence portion
gacccuuuaaacagaccucaac

SEQ ID NO: 11388 - RNA, 22 nt, Artificial Sequence
  SAMD9 targeting guide sequence portion
gagaaacagaguugaggucugu

SEQ ID NO: 11389 - RNA, 22 nt, Artificial Sequence
  SAMD9 targeting guide sequence portion
gaggucuguuuaaagggucuug

SEQ ID NO: 11390 - RNA, 22 nt, Artificial Sequence
  SAMD9 targeting guide sequence portion
gaguugaggucuguuuaaaggg

SEQ ID NO: 11391 - RNA, 22 nt, Artificial Sequence
  SAMD9 targeting guide sequence portion
gccaagacccuuuaaacagacc

SEQ ID NO: 11392 - RNA, 22 nt, Artificial Sequence
  SAMD9 targeting guide sequence portion
ggucuguuuaaagggucuuggc

SEQ ID NO: 11393 - RNA, 22 nt, Artificial Sequence
  SAMD9 targeting guide sequence portion
gucuguuuaaagggucuuggca

SEQ ID NO: 11394 - RNA, 22 nt, Artificial Sequence
  SAMD9 targeting guide sequence portion
guugaggucuguuuaaaggguc

SEQ ID NO: 11395 - RNA, 22 nt, Artificial Sequence
  SAMD9 targeting guide sequence portion
guuuaaagggucuuggcagaug

SEQ ID NO: 11396 - RNA, 22 nt, Artificial Sequence
  SAMD9 targeting guide sequence portion
uaaacagaccucaacucuguuu

SEQ ID NO: 11397 - RNA, 22 nt, Artificial Sequence
  SAMD9 targeting guide sequence portion
uccaucugccaagacccuuuaa

SEQ ID NO: 11398 - RNA, 22 nt, Artificial Sequence
  SAMD9 targeting guide sequence portion
ucugccaagacccuuuaaacag

SEQ ID NO: 11399 - RNA, 22 nt, Artificial Sequence
  SAMD9 targeting guide sequence portion
ucuguuuaaagggucuuggcag

SEQ ID NO: 11400 - RNA, 22 nt, Artificial Sequence
  SAMD9 targeting guide sequence portion
ucuuccaucugccaagacccuu

SEQ ID NO: 11401 - RNA, 22 nt, Artificial Sequence
  SAMD9 targeting guide sequence portion
ugagaaacagaguugaggucug

SEQ ID NO: 11402 - RNA, 22 nt, Artificial Sequence
  SAMD9 targeting guide sequence portion
ugaggucuguuuaaagggucuu

SEQ ID NO: 11403 - RNA, 22 nt, Artificial Sequence
  SAMD9 targeting guide sequence portion
ugccaagacccuuuaaacagac

SEQ ID NO: 11404 - RNA, 22 nt, Artificial Sequence
  SAMD9 targeting guide sequence portion
uguuuaaagggucuuggcagau

SEQ ID NO: 11405 - RNA, 22 nt, Artificial Sequence
  SAMD9 targeting guide sequence portion
uuaaacagaccucaacucuguu

SEQ ID NO: 11406 - RNA, 22 nt, Artificial Sequence
  SAMD9 targeting guide sequence portion
uuaaagggucuuggcagaugga

SEQ ID NO: 11407 - RNA, 22 nt, Artificial Sequence
  SAMD9 targeting guide sequence portion
uuccaucugccaagacccuuua

SEQ ID NO: 11408 - RNA, 22 nt, Artificial Sequence
  SAMD9 targeting guide sequence portion
uugagaaacagaguugaggucu

SEQ ID NO: 11409 - RNA, 22 nt, Artificial Sequence
  SAMD9 targeting guide sequence portion
uugaggucuguuuaaagggucu

SEQ ID NO: 11410 - RNA, 22 nt, Artificial Sequence
  SAMD9 targeting guide sequence portion
uuuaaacagaccucaacucugu

SEQ ID NO: 11411 - RNA, 22 nt, Artificial Sequence
  SAMD9 targeting guide sequence portion
uuuaaagggucuuggcagaugg

SEQ ID NO: 11412 - RNA, 22 nt, Artificial Sequence
  SAMD9 targeting guide sequence portion
uuugagaaacagaguugagguc

SEQ ID NO: 11413 - RNA, 22 nt, Artificial Sequence
  SAMD9 targeting guide sequence portion
uuuugagaaacagaguugaggu

SEQ ID NO: 11414 - RNA, 20 nt, Artificial Sequence
  SAMD9 targeting guide sequence portion
aaacagaguugaggucugug

SEQ ID NO: 11415 - RNA, 20 nt, Artificial Sequence
  SAMD9 targeting guide sequence portion
aacagaguugaggucugugu

SEQ ID NO: 11416 - RNA, 20 nt, Artificial Sequence
  SAMD9 targeting guide sequence portion
aagacccuuuacacagaccu

SEQ ID NO: 11417 - RNA, 20 nt, Artificial Sequence
  SAMD9 targeting guide sequence portion
acacagaccucaacucuguu

SEQ ID NO: 11418 - RNA, 20 nt, Artificial Sequence
  SAMD9 targeting guide sequence portion
acagaguugaggucugugua

SEQ ID NO: 11419 - RNA, 20 nt, Artificial Sequence
  SAMD9 targeting guide sequence portion
acccuuuacacagaccucaa

SEQ ID NO: 11420 - RNA, 20 nt, Artificial Sequence
  SAMD9 targeting guide sequence portion
agacccuuuacacagaccuc

SEQ ID NO: 11421 - RNA, 20 nt, Artificial Sequence
  SAMD9 targeting guide sequence portion
agaguugaggucuguguaaa

SEQ ID NO: 11422 - RNA, 20 nt, Artificial Sequence
  SAMD9 targeting guide sequence portion
aggucuguguaaagggucuu

SEQ ID NO: 11423 - RNA, 20 nt, Artificial Sequence
  SAMD9 targeting guide sequence portion
aguugaggucuguguaaagg

SEQ ID NO: 11424 - RNA, 20 nt, Artificial Sequence
  SAMD9 targeting guide sequence portion
aucugccaagacccuuuaca

SEQ ID NO: 11425 - RNA, 20 nt, Artificial Sequence
  SAMD9 targeting guide sequence portion
caagacccuuuacacagacc

SEQ ID NO: 11426 - RNA, 20 nt, Artificial Sequence
  SAMD9 targeting guide sequence portion
cacagaccucaacucuguuu

SEQ ID NO: 11427 - RNA, 20 nt, Artificial Sequence
  SAMD9 targeting guide sequence portion
cagaguugaggucuguguaa

SEQ ID NO: 11428 - RNA, 20 nt, Artificial Sequence
  SAMD9 targeting guide sequence portion
caucugccaagacccuuuac

SEQ ID NO: 11429 - RNA, 20 nt, Artificial Sequence
  SAMD9 targeting guide sequence portion
ccaagacccuuuacacagac

SEQ ID NO: 11430 - RNA, 20 nt, Artificial Sequence
  SAMD9 targeting guide sequence portion
cccuuuacacagaccucaac

SEQ ID NO: 11431 - RNA, 20 nt, Artificial Sequence
  SAMD9 targeting guide sequence portion
ccuuuacacagaccucaacu

SEQ ID NO: 11432 - RNA, 20 nt, Artificial Sequence
  SAMD9 targeting guide sequence portion
cugccaagacccuuuacaca

SEQ ID NO: 11433 - RNA, 20 nt, Artificial Sequence
  SAMD9 targeting guide sequence portion
cuguguaaagggucuuggca

SEQ ID NO: 11434 - RNA, 20 nt, Artificial Sequence
  SAMD9 targeting guide sequence portion
cuuuacacagaccucaacuc

SEQ ID NO: 11435 - RNA, 20 nt, Artificial Sequence
  SAMD9 targeting guide sequence portion
gacccuuuacacagaccuca

SEQ ID NO: 11436 - RNA, 20 nt, Artificial Sequence
  SAMD9 targeting guide sequence portion
gaggucuguguaaagggucu

SEQ ID NO: 11437 - RNA, 20 nt, Artificial Sequence
  SAMD9 targeting guide sequence portion
gaguugaggucuguguaaag

SEQ ID NO: 11438 - RNA, 20 nt, Artificial Sequence
  SAMD9 targeting guide sequence portion
gccaagacccuuuacacaga

SEQ ID NO: 11439 - RNA, 20 nt, Artificial Sequence
  SAMD9 targeting guide sequence portion
ggucuguguaaagggucuug

SEQ ID NO: 11440 - RNA, 20 nt, Artificial Sequence
  SAMD9 targeting guide sequence portion
guaaagggucuuggcagaug

SEQ ID NO: 11441 - RNA, 20 nt, Artificial Sequence
  SAMD9 targeting guide sequence portion
gucuguguaaagggucuugg

SEQ ID NO: 11442 - RNA, 20 nt, Artificial Sequence
  SAMD9 targeting guide sequence portion
guguaaagggucuuggcaga

SEQ ID NO: 11443 - RNA, 20 nt, Artificial Sequence
  SAMD9 targeting guide sequence portion
guugaggucuguguaaaggg

SEQ ID NO: 11444 - RNA, 20 nt, Artificial Sequence
  SAMD9 targeting guide sequence portion
uacacagaccucaacucugu

SEQ ID NO: 11445 - RNA, 20 nt, Artificial Sequence
  SAMD9 targeting guide sequence portion
ucugccaagacccuuuacac

SEQ ID NO: 11446 - RNA, 20 nt, Artificial Sequence
  SAMD9 targeting guide sequence portion
ucuguguaaagggucuuggc

SEQ ID NO: 11447 - RNA, 20 nt, Artificial Sequence
  SAMD9 targeting guide sequence portion
ugaggucuguguaaaggguc

SEQ ID NO: 11448 - RNA, 20 nt, Artificial Sequence
  SAMD9 targeting guide sequence portion
ugccaagacccuuuacacag

SEQ ID NO: 11449 - RNA, 20 nt, Artificial Sequence
  SAMD9 targeting guide sequence portion
uguaaagggucuuggcagau

SEQ ID NO: 11450 - RNA, 20 nt, Artificial Sequence
  SAMD9 targeting guide sequence portion
uguguaaagggucuuggcag

SEQ ID NO: 11451 - RNA, 20 nt, Artificial Sequence
  SAMD9 targeting guide sequence portion
uuacacagaccucaacucug

SEQ ID NO: 11452 - RNA, 20 nt, Artificial Sequence
  SAMD9 targeting guide sequence portion
uugaggucuguguaaagggu

SEQ ID NO: 11453 - RNA, 20 nt, Artificial Sequence
  SAMD9 targeting guide sequence portion
uuuacacagaccucaacucu

SEQ ID NO: 11454 - RNA, 21 nt, Artificial Sequence
  SAMD9 targeting guide sequence portion
aaacagaguugaggucugugu

SEQ ID NO: 11455 - RNA, 21 nt, Artificial Sequence
  SAMD9 targeting guide sequence portion
aacagaguugaggucugugua

SEQ ID NO: 11456 - RNA, 21 nt, Artificial Sequence
  SAMD9 targeting guide sequence portion
aagacccuuuacacagaccuc

SEQ ID NO: 11457 - RNA, 21 nt, Artificial Sequence
  SAMD9 targeting guide sequence portion
acacagaccucaacucuguuu

SEQ ID NO: 11458 - RNA, 21 nt, Artificial Sequence
  SAMD9 targeting guide sequence portion
acagaguugaggucuguguaa

SEQ ID NO: 11459 - RNA, 21 nt, Artificial Sequence
  SAMD9 targeting guide sequence portion
acccuuuacacagaccucaac

SEQ ID NO: 11460 - RNA, 21 nt, Artificial Sequence
  SAMD9 targeting guide sequence portion
agacccuuuacacagaccuca

SEQ ID NO: 11461 - RNA, 21 nt, Artificial Sequence
  SAMD9 targeting guide sequence portion
agaguugaggucuguguaaag

SEQ ID NO: 11462 - RNA, 21 nt, Artificial Sequence
  SAMD9 targeting guide sequence portion
aggucuguguaaagggucuug

SEQ ID NO: 11463 - RNA, 21 nt, Artificial Sequence
  SAMD9 targeting guide sequence portion
aguugaggucuguguaaaggg

SEQ ID NO: 11464 - RNA, 21 nt, Artificial Sequence
  SAMD9 targeting guide sequence portion
aucugccaagacccuuuacac

SEQ ID NO: 11465 - RNA, 21 nt, Artificial Sequence
  SAMD9 targeting guide sequence portion
caagacccuuuacacagaccu

SEQ ID NO: 11466 - RNA, 21 nt, Artificial Sequence
  SAMD9 targeting guide sequence portion
cacagaccucaacucuguuuc

SEQ ID NO: 11467 - RNA, 21 nt, Artificial Sequence
  SAMD9 targeting guide sequence portion
cagaguugaggucuguguaaa

SEQ ID NO: 11468 - RNA, 21 nt, Artificial Sequence
  SAMD9 targeting guide sequence portion
caucugccaagacccuuuaca

SEQ ID NO: 11469 - RNA, 21 nt, Artificial Sequence
  SAMD9 targeting guide sequence portion
ccaagacccuuuacacagacc

SEQ ID NO: 11470 - RNA, 21 nt, Artificial Sequence
  SAMD9 targeting guide sequence portion
ccaucugccaagacccuuuac

SEQ ID NO: 11471 - RNA, 21 nt, Artificial Sequence
  SAMD9 targeting guide sequence portion
cccuuuacacagaccucaacu

SEQ ID NO: 11472 - RNA, 21 nt, Artificial Sequence
  SAMD9 targeting guide sequence portion
ccuuuacacagaccucaacuc

SEQ ID NO: 11473 - RNA, 21 nt, Artificial Sequence
  SAMD9 targeting guide sequence portion
cugccaagacccuuuacacag

SEQ ID NO: 11474 - RNA, 21 nt, Artificial Sequence
  SAMD9 targeting guide sequence portion
cuguguaaagggucuuggcag

SEQ ID NO: 11475 - RNA, 21 nt, Artificial Sequence
  SAMD9 targeting guide sequence portion
cuuuacacagaccucaacucu

SEQ ID NO: 11476 - RNA, 21 nt, Artificial Sequence
  SAMD9 targeting guide sequence portion
gaaacagaguugaggucugug

SEQ ID NO: 11477 - RNA, 21 nt, Artificial Sequence
  SAMD9 targeting guide sequence portion
gacccuuuacacagaccucaa

SEQ ID NO: 11478 - RNA, 21 nt, Artificial Sequence
  SAMD9 targeting guide sequence portion
gaggucuguguaaagggucuu

SEQ ID NO: 11479 - RNA, 21 nt, Artificial Sequence
  SAMD9 targeting guide sequence portion
gaguugaggucuguguaaagg

SEQ ID NO: 11480 - RNA, 21 nt, Artificial Sequence
  SAMD9 targeting guide sequence portion
gccaagacccuuuacacagac

SEQ ID NO: 11481 - RNA, 21 nt, Artificial Sequence
  SAMD9 targeting guide sequence portion
ggucuguguaaagggucuugg

SEQ ID NO: 11482 - RNA, 21 nt, Artificial Sequence
  SAMD9 targeting guide sequence portion
guaaagggucuuggcagaugg

SEQ ID NO: 11483 - RNA, 21 nt, Artificial Sequence
  SAMD9 targeting guide sequence portion
gucuguguaaagggucuuggc

SEQ ID NO: 11484 - RNA, 21 nt, Artificial Sequence
  SAMD9 targeting guide sequence portion
guguaaagggucuuggcagau

SEQ ID NO: 11485 - RNA, 21 nt, Artificial Sequence
  SAMD9 targeting guide sequence portion
guugaggucuguguaaagggu

SEQ ID NO: 11486 - RNA, 21 nt, Artificial Sequence
  SAMD9 targeting guide sequence portion
uacacagaccucaacucuguu

SEQ ID NO: 11487 - RNA, 21 nt, Artificial Sequence
  SAMD9 targeting guide sequence portion
ucugccaagacccuuuacaca

SEQ ID NO: 11488 - RNA, 21 nt, Artificial Sequence
  SAMD9 targeting guide sequence portion
ucuguguaaagggucuuggca

SEQ ID NO: 11489 - RNA, 21 nt, Artificial Sequence
  SAMD9 targeting guide sequence portion
ugaggucuguguaaagggucu

SEQ ID NO: 11490 - RNA, 21 nt, Artificial Sequence
  SAMD9 targeting guide sequence portion
ugccaagacccuuuacacaga

SEQ ID NO: 11491 - RNA, 21 nt, Artificial Sequence
  SAMD9 targeting guide sequence portion
uguaaagggucuuggcagaug

SEQ ID NO: 11492 - RNA, 21 nt, Artificial Sequence
  SAMD9 targeting guide sequence portion
uguguaaagggucuuggcaga

SEQ ID NO: 11493 - RNA, 21 nt, Artificial Sequence
  SAMD9 targeting guide sequence portion
uuacacagaccucaacucugu

SEQ ID NO: 11494 - RNA, 21 nt, Artificial Sequence
  SAMD9 targeting guide sequence portion
uugaggucuguguaaaggguc

SEQ ID NO: 11495 - RNA, 21 nt, Artificial Sequence
  SAMD9 targeting guide sequence portion
uuuacacagaccucaacucug

SEQ ID NO: 11496 - RNA, 22 nt, Artificial Sequence
  SAMD9 targeting guide sequence portion
aaacagaguugaggucugugua

SEQ ID NO: 11497 - RNA, 22 nt, Artificial Sequence
  SAMD9 targeting guide sequence portion
aacagaguugaggucuguguaa

SEQ ID NO: 11498 - RNA, 22 nt, Artificial Sequence
  SAMD9 targeting guide sequence portion
aagacccuuuacacagaccuca

SEQ ID NO: 11499 - RNA, 22 nt, Artificial Sequence
  SAMD9 targeting guide sequence portion
acacagaccucaacucuguuuc

SEQ ID NO: 11500 - RNA, 22 nt, Artificial Sequence
  SAMD9 targeting guide sequence portion
acagaguugaggucuguguaaa

SEQ ID NO: 11501 - RNA, 22 nt, Artificial Sequence
  SAMD9 targeting guide sequence portion
acccuuuacacagaccucaacu

SEQ ID NO: 11502 - RNA, 22 nt, Artificial Sequence
  SAMD9 targeting guide sequence portion
agaaacagaguugaggucugug

SEQ ID NO: 11503 - RNA, 22 nt, Artificial Sequence
  SAMD9 targeting guide sequence portion
agacccuuuacacagaccucaa

SEQ ID NO: 11504 - RNA, 22 nt, Artificial Sequence
  SAMD9 targeting guide sequence portion
agaguugaggucuguguaaagg

SEQ ID NO: 11505 - RNA, 22 nt, Artificial Sequence
  SAMD9 targeting guide sequence portion
aggucuguguaaagggucuugg

SEQ ID NO: 11506 - RNA, 22 nt, Artificial Sequence
  SAMD9 targeting guide sequence portion
aguugaggucuguguaaagggu

SEQ ID NO: 11507 - RNA, 22 nt, Artificial Sequence
  SAMD9 targeting guide sequence portion
aucugccaagacccuuuacaca

SEQ ID NO: 11508 - RNA, 22 nt, Artificial Sequence
  SAMD9 targeting guide sequence portion
caagacccuuuacacagaccuc

SEQ ID NO: 11509 - RNA, 22 nt, Artificial Sequence
  SAMD9 targeting guide sequence portion
cacagaccucaacucuguuucu

SEQ ID NO: 11510 - RNA, 22 nt, Artificial Sequence
  SAMD9 targeting guide sequence portion
cagaguugaggucuguguaaag

SEQ ID NO: 11511 - RNA, 22 nt, Artificial Sequence
  SAMD9 targeting guide sequence portion
caucugccaagacccuuuacac

SEQ ID NO: 11512 - RNA, 22 nt, Artificial Sequence
  SAMD9 targeting guide sequence portion
ccaagacccuuuacacagaccu

SEQ ID NO: 11513 - RNA, 22 nt, Artificial Sequence
  SAMD9 targeting guide sequence portion
ccaucugccaagacccuuuaca

SEQ ID NO: 11514 - RNA, 22 nt, Artificial Sequence
  SAMD9 targeting guide sequence portion
cccuuuacacagaccucaacuc

SEQ ID NO: 11515 - RNA, 22 nt, Artificial Sequence
  SAMD9 targeting guide sequence portion
ccuuuacacagaccucaacucu

SEQ ID NO: 11516 - RNA, 22 nt, Artificial Sequence
  SAMD9 targeting guide sequence portion
cugccaagacccuuuacacaga

SEQ ID NO: 11517 - RNA, 22 nt, Artificial Sequence
  SAMD9 targeting guide sequence portion
cuguguaaagggucuuggcaga

SEQ ID NO: 11518 - RNA, 22 nt, Artificial Sequence
  SAMD9 targeting guide sequence portion
cuuuacacagaccucaacucug

SEQ ID NO: 11519 - RNA, 22 nt, Artificial Sequence
  SAMD9 targeting guide sequence portion
gaaacagaguugaggucugugu

SEQ ID NO: 11520 - RNA, 22 nt, Artificial Sequence
  SAMD9 targeting guide sequence portion
gacccuuuacacagaccucaac

SEQ ID NO: 11521 - RNA, 22 nt, Artificial Sequence
  SAMD9 targeting guide sequence portion
gaggucuguguaaagggucuug

SEQ ID NO: 11522 - RNA, 22 nt, Artificial Sequence
  SAMD9 targeting guide sequence portion
gaguugaggucuguguaaaggg

SEQ ID NO: 11523 - RNA, 22 nt, Artificial Sequence
  SAMD9 targeting guide sequence portion
gccaagacccuuuacacagacc

SEQ ID NO: 11524 - RNA, 22 nt, Artificial Sequence
  SAMD9 targeting guide sequence portion
ggucuguguaaagggucuuggc

SEQ ID NO: 11525 - RNA, 22 nt, Artificial Sequence
  SAMD9 targeting guide sequence portion
guaaagggucuuggcagaugga

SEQ ID NO: 11526 - RNA, 22 nt, Artificial Sequence
  SAMD9 targeting guide sequence portion
gucuguguaaagggucuuggca

SEQ ID NO: 11527 - RNA, 22 nt, Artificial Sequence
  SAMD9 targeting guide sequence portion
guguaaagggucuuggcagaug

SEQ ID NO: 11528 - RNA, 22 nt, Artificial Sequence
  SAMD9 targeting guide sequence portion
guugaggucuguguaaaggguc

SEQ ID NO: 11529 - RNA, 22 nt, Artificial Sequence
  SAMD9 targeting guide sequence portion
uacacagaccucaacucuguuu

SEQ ID NO: 11530 - RNA, 22 nt, Artificial Sequence
  SAMD9 targeting guide sequence portion
uccaucugccaagacccuuuac

SEQ ID NO: 11531 - RNA, 22 nt, Artificial Sequence
  SAMD9 targeting guide sequence portion
ucugccaagacccuuuacacag

SEQ ID NO: 11532 - RNA, 22 nt, Artificial Sequence
  SAMD9 targeting guide sequence portion
ucuguguaaagggucuuggcag

SEQ ID NO: 11533 - RNA, 22 nt, Artificial Sequence
  SAMD9 targeting guide sequence portion
ugaggucuguguaaagggucuu

SEQ ID NO: 11534 - RNA, 22 nt, Artificial Sequence
  SAMD9 targeting guide sequence portion
ugccaagacccuuuacacagac

SEQ ID NO: 11535 - RNA, 22 nt, Artificial Sequence
  SAMD9 targeting guide sequence portion
uguaaagggucuuggcagaugg

SEQ ID NO: 11536 - RNA, 22 nt, Artificial Sequence
  SAMD9 targeting guide sequence portion
uguguaaagggucuuggcagau

SEQ ID NO: 11537 - RNA, 22 nt, Artificial Sequence
  SAMD9 targeting guide sequence portion
uuacacagaccucaacucuguu

SEQ ID NO: 11538 - RNA, 22 nt, Artificial Sequence
  SAMD9 targeting guide sequence portion
uugaggucuguguaaagggucu

SEQ ID NO: 11539 - RNA, 22 nt, Artificial Sequence
  SAMD9 targeting guide sequence portion
uuuacacagaccucaacucugu

SEQ ID NO: 11540 - RNA, 20 nt, Artificial Sequence
  SAMD9 targeting guide sequence portion
aaauauagcaaugguuagaa

SEQ ID NO: 11541 - RNA, 20 nt, Artificial Sequence
  SAMD9 targeting guide sequence portion
aauauagcaaugguuagaaa

SEQ ID NO: 11542 - RNA, 20 nt, Artificial Sequence
  SAMD9 targeting guide sequence portion
aaugguuagaaaaaaugaaa

SEQ ID NO: 11543 - RNA, 20 nt, Artificial Sequence
  SAMD9 targeting guide sequence portion
aauuucauuuuuucuaacca

SEQ ID NO: 11544 - RNA, 20 nt, Artificial Sequence
  SAMD9 targeting guide sequence portion
agaaauauagcaaugguuag

SEQ ID NO: 11545 - RNA, 20 nt, Artificial Sequence
  SAMD9 targeting guide sequence portion
agcaaugguuagaaaaaaug

SEQ ID NO: 11546 - RNA, 20 nt, Artificial Sequence
  SAMD9 targeting guide sequence portion
auagcaaugguuagaaaaaa

SEQ ID NO: 11547 - RNA, 20 nt, Artificial Sequence
  SAMD9 targeting guide sequence portion
auauagcaaugguuagaaaa

SEQ ID NO: 11548 - RNA, 20 nt, Artificial Sequence
  SAMD9 targeting guide sequence portion
augguuagaaaaaaugaaau

SEQ ID NO: 11549 - RNA, 20 nt, Artificial Sequence
  SAMD9 targeting guide sequence portion
auuucauuuuuucuaaccau

SEQ ID NO: 11550 - RNA, 20 nt, Artificial Sequence
  SAMD9 targeting guide sequence portion
auuuuuucuaaccauugcua

SEQ ID NO: 11551 - RNA, 20 nt, Artificial Sequence
  SAMD9 targeting guide sequence portion
caaugguuagaaaaaaugaa

SEQ ID NO: 11552 - RNA, 20 nt, Artificial Sequence
  SAMD9 targeting guide sequence portion
cauuuuuucuaaccauugcu

SEQ ID NO: 11553 - RNA, 20 nt, Artificial Sequence
  SAMD9 targeting guide sequence portion
cugacuauuauuauuugaau

SEQ ID NO: 11554 - RNA, 20 nt, Artificial Sequence
  SAMD9 targeting guide sequence portion
gaaauauagcaaugguuaga

SEQ ID NO: 11555 - RNA, 20 nt, Artificial Sequence
  SAMD9 targeting guide sequence portion
gaauuucauuuuuucuaacc

SEQ ID NO: 11556 - RNA, 20 nt, Artificial Sequence
  SAMD9 targeting guide sequence portion
gcaaugguuagaaaaaauga

SEQ ID NO: 11557 - RNA, 20 nt, Artificial Sequence
  SAMD9 targeting guide sequence portion
gcugacuauuauuauuugaa

SEQ ID NO: 11558 - RNA, 20 nt, Artificial Sequence
  SAMD9 targeting guide sequence portion
gguuagaaaaaaugaaauuc

SEQ ID NO: 11559 - RNA, 20 nt, Artificial Sequence
  SAMD9 targeting guide sequence portion
guuagaaaaaaugaaauuca

SEQ ID NO: 11560 - RNA, 20 nt, Artificial Sequence
  SAMD9 targeting guide sequence portion
uagcaaugguuagaaaaaau

SEQ ID NO: 11561 - RNA, 20 nt, Artificial Sequence
  SAMD9 targeting guide sequence portion
uauagcaaugguuagaaaaa

SEQ ID NO: 11562 - RNA, 20 nt, Artificial Sequence
  SAMD9 targeting guide sequence portion
ucauuuuuucuaaccauugc

SEQ ID NO: 11563 - RNA, 20 nt, Artificial Sequence
  SAMD9 targeting guide sequence portion
ugaauuucauuuuuucuaac

SEQ ID NO: 11564 - RNA, 20 nt, Artificial Sequence
  SAMD9 targeting guide sequence portion
ugguuagaaaaaaugaaauu

SEQ ID NO: 11565 - RNA, 20 nt, Artificial Sequence
  SAMD9 targeting guide sequence portion
uucauuuuuucuaaccauug

SEQ ID NO: 11566 - RNA, 20 nt, Artificial Sequence
  SAMD9 targeting guide sequence portion
uuucauuuuuucuaaccauu

SEQ ID NO: 11567 - RNA, 20 nt, Artificial Sequence
  SAMD9 targeting guide sequence portion
uuuuuucuaaccauugcuau

SEQ ID NO: 11568 - RNA, 21 nt, Artificial Sequence
  SAMD9 targeting guide sequence portion
aaauauagcaaugguuagaaa

SEQ ID NO: 11569 - RNA, 21 nt, Artificial Sequence
  SAMD9 targeting guide sequence portion
aauauagcaaugguuagaaaa

SEQ ID NO: 11570 - RNA, 21 nt, Artificial Sequence
  SAMD9 targeting guide sequence portion
agaaauauagcaaugguuaga

SEQ ID NO: 11571 - RNA, 21 nt, Artificial Sequence
  SAMD9 targeting guide sequence portion
agcaaugguuagaaaaaauga

SEQ ID NO: 11572 - RNA, 21 nt, Artificial Sequence
  SAMD9 targeting guide sequence portion
agcugacuauuauuauuugaa

SEQ ID NO: 11573 - RNA, 21 nt, Artificial Sequence
  SAMD9 targeting guide sequence portion
auagcaaugguuagaaaaaau

SEQ ID NO: 11574 - RNA, 21 nt, Artificial Sequence
  SAMD9 targeting guide sequence portion
auauagcaaugguuagaaaaa

SEQ ID NO: 11575 - RNA, 21 nt, Artificial Sequence
  SAMD9 targeting guide sequence portion
auuuuuucuaaccauugcuau

SEQ ID NO: 11576 - RNA, 21 nt, Artificial Sequence
  SAMD9 targeting guide sequence portion
caaugguuagaaaaaaugaaa

SEQ ID NO: 11577 - RNA, 21 nt, Artificial Sequence
  SAMD9 targeting guide sequence portion
cagaaauauagcaaugguuag

SEQ ID NO: 11578 - RNA, 21 nt, Artificial Sequence
  SAMD9 targeting guide sequence portion
cauuuuuucuaaccauugcua

SEQ ID NO: 11579 - RNA, 21 nt, Artificial Sequence
  SAMD9 targeting guide sequence portion
gaaauauagcaaugguuagaa

SEQ ID NO: 11580 - RNA, 21 nt, Artificial Sequence
  SAMD9 targeting guide sequence portion
gaauuucauuuuuucuaacca

SEQ ID NO: 11581 - RNA, 21 nt, Artificial Sequence
  SAMD9 targeting guide sequence portion
gcaaugguuagaaaaaaugaa

SEQ ID NO: 11582 - RNA, 21 nt, Artificial Sequence
  SAMD9 targeting guide sequence portion
gcugacuauuauuauuugaau

SEQ ID NO: 11583 - RNA, 21 nt, Artificial Sequence
  SAMD9 targeting guide sequence portion
gguuagaaaaaaugaaauuca

SEQ ID NO: 11584 - RNA, 21 nt, Artificial Sequence
  SAMD9 targeting guide sequence portion
uagcaaugguuagaaaaaaug

SEQ ID NO: 11585 - RNA, 21 nt, Artificial Sequence
  SAMD9 targeting guide sequence portion
uauagcaaugguuagaaaaaa

SEQ ID NO: 11586 - RNA, 21 nt, Artificial Sequence
  SAMD9 targeting guide sequence portion
ucauuuuuucuaaccauugcu

SEQ ID NO: 11587 - RNA, 21 nt, Artificial Sequence
  SAMD9 targeting guide sequence portion
ugaauuucauuuuuucuaacc

SEQ ID NO: 11588 - RNA, 21 nt, Artificial Sequence
  SAMD9 targeting guide sequence portion
ugguuagaaaaaaugaaauuc

SEQ ID NO: 11589 - RNA, 21 nt, Artificial Sequence
  SAMD9 targeting guide sequence portion
uucauuuuuucuaaccauugc

SEQ ID NO: 11590 - RNA, 21 nt, Artificial Sequence
  SAMD9 targeting guide sequence portion
uuucauuuuuucuaaccauug

SEQ ID NO: 11591 - RNA, 21 nt, Artificial Sequence
  SAMD9 targeting guide sequence portion
uuuuuucuaaccauugcuaua

SEQ ID NO: 11592 - RNA, 22 nt, Artificial Sequence
  SAMD9 targeting guide sequence portion
aaauauagcaaugguuagaaaa

SEQ ID NO: 11593 - RNA, 22 nt, Artificial Sequence
  SAMD9 targeting guide sequence portion
aagcugacuauuauuauuugaa

SEQ ID NO: 11594 - RNA, 22 nt, Artificial Sequence
  SAMD9 targeting guide sequence portion
aauauagcaaugguuagaaaaa

SEQ ID NO: 11595 - RNA, 22 nt, Artificial Sequence
  SAMD9 targeting guide sequence portion
acagaaauauagcaaugguuag

SEQ ID NO: 11596 - RNA, 22 nt, Artificial Sequence
  SAMD9 targeting guide sequence portion
agaaauauagcaaugguuagaa

SEQ ID NO: 11597 - RNA, 22 nt, Artificial Sequence
  SAMD9 targeting guide sequence portion
agcaaugguuagaaaaaaugaa

SEQ ID NO: 11598 - RNA, 22 nt, Artificial Sequence
  SAMD9 targeting guide sequence portion
agcugacuauuauuauuugaau

SEQ ID NO: 11599 - RNA, 22 nt, Artificial Sequence
  SAMD9 targeting guide sequence portion
auagcaaugguuagaaaaaaug

SEQ ID NO: 11600 - RNA, 22 nt, Artificial Sequence
  SAMD9 targeting guide sequence portion
auauagcaaugguuagaaaaaa

SEQ ID NO: 11601 - RNA, 22 nt, Artificial Sequence
  SAMD9 targeting guide sequence portion
augguuagaaaaaaugaaauuc

SEQ ID NO: 11602 - RNA, 22 nt, Artificial Sequence
  SAMD9 targeting guide sequence portion
auuucauuuuuucuaaccauug

SEQ ID NO: 11603 - RNA, 22 nt, Artificial Sequence
  SAMD9 targeting guide sequence portion
auuuuuucuaaccauugcuaua

SEQ ID NO: 11604 - RNA, 22 nt, Artificial Sequence
  SAMD9 targeting guide sequence portion
caaugguuagaaaaaaugaaau

SEQ ID NO: 11605 - RNA, 22 nt, Artificial Sequence
  SAMD9 targeting guide sequence portion
cagaaauauagcaaugguuaga

SEQ ID NO: 11606 - RNA, 22 nt, Artificial Sequence
  SAMD9 targeting guide sequence portion
cauuuuuucuaaccauugcuau

SEQ ID NO: 11607 - RNA, 22 nt, Artificial Sequence
  SAMD9 targeting guide sequence portion
gaaauauagcaaugguuagaaa

SEQ ID NO: 11608 - RNA, 22 nt, Artificial Sequence
  SAMD9 targeting guide sequence portion
gaauuucauuuuuucuaaccau

SEQ ID NO: 11609 - RNA, 22 nt, Artificial Sequence
  SAMD9 targeting guide sequence portion
gcaaugguuagaaaaaaugaaa

SEQ ID NO: 11610 - RNA, 22 nt, Artificial Sequence
  SAMD9 targeting guide sequence portion
gcugacuauuauuauuugaauu

SEQ ID NO: 11611 - RNA, 22 nt, Artificial Sequence
  SAMD9 targeting guide sequence portion
gguuagaaaaaaugaaauucaa

SEQ ID NO: 11612 - RNA, 22 nt, Artificial Sequence
  SAMD9 targeting guide sequence portion
uagcaaugguuagaaaaaauga

SEQ ID NO: 11613 - RNA, 22 nt, Artificial Sequence
  SAMD9 targeting guide sequence portion
uauagcaaugguuagaaaaaau

SEQ ID NO: 11614 - RNA, 22 nt, Artificial Sequence
  SAMD9 targeting guide sequence portion
ucauuuuuucuaaccauugcua

SEQ ID NO: 11615 - RNA, 22 nt, Artificial Sequence
  SAMD9 targeting guide sequence portion
ugaauuucauuuuuucuaacca

SEQ ID NO: 11616 - RNA, 22 nt, Artificial Sequence
  SAMD9 targeting guide sequence portion
ugguuagaaaaaaugaaauuca

SEQ ID NO: 11617 - RNA, 22 nt, Artificial Sequence
  SAMD9 targeting guide sequence portion
uucauuuuuucuaaccauugcu

SEQ ID NO: 11618 - RNA, 22 nt, Artificial Sequence
  SAMD9 targeting guide sequence portion
uugaauuucauuuuuucuaacc

SEQ ID NO: 11619 - RNA, 22 nt, Artificial Sequence
  SAMD9 targeting guide sequence portion
uuucauuuuuucuaaccauugc

SEQ ID NO: 11620 - RNA, 22 nt, Artificial Sequence
  SAMD9 targeting guide sequence portion
uuuuuucuaaccauugcuauau

SEQ ID NO: 11621 - RNA, 20 nt, Artificial Sequence
  SAMD9 targeting guide sequence portion
aaugguuagaaaaacugaaa

SEQ ID NO: 11622 - RNA, 20 nt, Artificial Sequence
  SAMD9 targeting guide sequence portion
aauuucaguuuuucuaacca

SEQ ID NO: 11623 - RNA, 20 nt, Artificial Sequence
  SAMD9 targeting guide sequence portion
agaaaaacugaaauucaaau

SEQ ID NO: 11624 - RNA, 20 nt, Artificial Sequence
  SAMD9 targeting guide sequence portion
agcaaugguuagaaaaacug

SEQ ID NO: 11625 - RNA, 20 nt, Artificial Sequence
  SAMD9 targeting guide sequence portion
aguuuuucuaaccauugcua

SEQ ID NO: 11626 - RNA, 20 nt, Artificial Sequence
  SAMD9 targeting guide sequence portion
auagcaaugguuagaaaaac

SEQ ID NO: 11627 - RNA, 20 nt, Artificial Sequence
  SAMD9 targeting guide sequence portion
augguuagaaaaacugaaau

SEQ ID NO: 11628 - RNA, 20 nt, Artificial Sequence
  SAMD9 targeting guide sequence portion
auuucaguuuuucuaaccau

SEQ ID NO: 11629 - RNA, 20 nt, Artificial Sequence
  SAMD9 targeting guide sequence portion
auuugaauuucaguuuuucu

SEQ ID NO: 11630 - RNA, 20 nt, Artificial Sequence
  SAMD9 targeting guide sequence portion
caaugguuagaaaaacugaa

SEQ ID NO: 11631 - RNA, 20 nt, Artificial Sequence
  SAMD9 targeting guide sequence portion
caguuuuucuaaccauugcu

SEQ ID NO: 11632 - RNA, 20 nt, Artificial Sequence
  SAMD9 targeting guide sequence portion
gaaaaacugaaauucaaaua

SEQ ID NO: 11633 - RNA, 20 nt, Artificial Sequence
  SAMD9 targeting guide sequence portion
gaauuucaguuuuucuaacc

SEQ ID NO: 11634 - RNA, 20 nt, Artificial Sequence
  SAMD9 targeting guide sequence portion
gcaaugguuagaaaaacuga

SEQ ID NO: 11635 - RNA, 20 nt, Artificial Sequence
  SAMD9 targeting guide sequence portion
gguuagaaaaacugaaauuc

SEQ ID NO: 11636 - RNA, 20 nt, Artificial Sequence
  SAMD9 targeting guide sequence portion
guuagaaaaacugaaauuca

SEQ ID NO: 11637 - RNA, 20 nt, Artificial Sequence
  SAMD9 targeting guide sequence portion
guuuuucuaaccauugcuau

SEQ ID NO: 11638 - RNA, 20 nt, Artificial Sequence
  SAMD9 targeting guide sequence portion
uagaaaaacugaaauucaaa

SEQ ID NO: 11639 - RNA, 20 nt, Artificial Sequence
  SAMD9 targeting guide sequence portion
uagcaaugguuagaaaaacu

SEQ ID NO: 11640 - RNA, 20 nt, Artificial Sequence
  SAMD9 targeting guide sequence portion
uauuugaauuucaguuuuuc

SEQ ID NO: 11641 - RNA, 20 nt, Artificial Sequence
  SAMD9 targeting guide sequence portion
ucaguuuuucuaaccauugc

SEQ ID NO: 11642 - RNA, 20 nt, Artificial Sequence
  SAMD9 targeting guide sequence portion
ugaauuucaguuuuucuaac

SEQ ID NO: 11643 - RNA, 20 nt, Artificial Sequence
  SAMD9 targeting guide sequence portion
ugguuagaaaaacugaaauu

SEQ ID NO: 11644 - RNA, 20 nt, Artificial Sequence
  SAMD9 targeting guide sequence portion
uuagaaaaacugaaauucaa

SEQ ID NO: 11645 - RNA, 20 nt, Artificial Sequence
  SAMD9 targeting guide sequence portion
uucaguuuuucuaaccauug

SEQ ID NO: 11646 - RNA, 20 nt, Artificial Sequence
  SAMD9 targeting guide sequence portion
uugaauuucaguuuuucuaa

SEQ ID NO: 11647 - RNA, 20 nt, Artificial Sequence
  SAMD9 targeting guide sequence portion
uuucaguuuuucuaaccauu

SEQ ID NO: 11648 - RNA, 20 nt, Artificial Sequence
  SAMD9 targeting guide sequence portion
uuugaauuucaguuuuucua

SEQ ID NO: 11649 - RNA, 21 nt, Artificial Sequence
  SAMD9 targeting guide sequence portion
aaugguuagaaaaacugaaau

SEQ ID NO: 11650 - RNA, 21 nt, Artificial Sequence
  SAMD9 targeting guide sequence portion
aauuucaguuuuucuaaccau

SEQ ID NO: 11651 - RNA, 21 nt, Artificial Sequence
  SAMD9 targeting guide sequence portion
agcaaugguuagaaaaacuga

SEQ ID NO: 11652 - RNA, 21 nt, Artificial Sequence
  SAMD9 targeting guide sequence portion
aguuuuucuaaccauugcuau

SEQ ID NO: 11653 - RNA, 21 nt, Artificial Sequence
  SAMD9 targeting guide sequence portion
auagcaaugguuagaaaaacu

SEQ ID NO: 11654 - RNA, 21 nt, Artificial Sequence
  SAMD9 targeting guide sequence portion
augguuagaaaaacugaaauu

SEQ ID NO: 11655 - RNA, 21 nt, Artificial Sequence
  SAMD9 targeting guide sequence portion
auuucaguuuuucuaaccauu

SEQ ID NO: 11656 - RNA, 21 nt, Artificial Sequence
  SAMD9 targeting guide sequence portion
caaugguuagaaaaacugaaa

SEQ ID NO: 11657 - RNA, 21 nt, Artificial Sequence
  SAMD9 targeting guide sequence portion
caguuuuucuaaccauugcua

SEQ ID NO: 11658 - RNA, 21 nt, Artificial Sequence
  SAMD9 targeting guide sequence portion
gaauuucaguuuuucuaacca

SEQ ID NO: 11659 - RNA, 21 nt, Artificial Sequence
  SAMD9 targeting guide sequence portion
gcaaugguuagaaaaacugaa

SEQ ID NO: 11660 - RNA, 21 nt, Artificial Sequence
  SAMD9 targeting guide sequence portion
gguuagaaaaacugaaauuca

SEQ ID NO: 11661 - RNA, 21 nt, Artificial Sequence
  SAMD9 targeting guide sequence portion
guuagaaaaacugaaauucaa

SEQ ID NO: 11662 - RNA, 21 nt, Artificial Sequence
  SAMD9 targeting guide sequence portion
guuuuucuaaccauugcuaua

SEQ ID NO: 11663 - RNA, 21 nt, Artificial Sequence
  SAMD9 targeting guide sequence portion
uagcaaugguuagaaaaacug

SEQ ID NO: 11664 - RNA, 21 nt, Artificial Sequence
  SAMD9 targeting guide sequence portion
uauagcaaugguuagaaaaac

SEQ ID NO: 11665 - RNA, 21 nt, Artificial Sequence
  SAMD9 targeting guide sequence portion
ucaguuuuucuaaccauugcu

SEQ ID NO: 11666 - RNA, 21 nt, Artificial Sequence
  SAMD9 targeting guide sequence portion
ugaauuucaguuuuucuaacc

SEQ ID NO: 11667 - RNA, 21 nt, Artificial Sequence
  SAMD9 targeting guide sequence portion
ugguuagaaaaacugaaauuc

SEQ ID NO: 11668 - RNA, 21 nt, Artificial Sequence
  SAMD9 targeting guide sequence portion
uucaguuuuucuaaccauugc

SEQ ID NO: 11669 - RNA, 21 nt, Artificial Sequence
  SAMD9 targeting guide sequence portion
uugaauuucaguuuuucuaac

SEQ ID NO: 11670 - RNA, 21 nt, Artificial Sequence
  SAMD9 targeting guide sequence portion
uuucaguuuuucuaaccauug

SEQ ID NO: 11671 - RNA, 22 nt, Artificial Sequence
  SAMD9 targeting guide sequence portion
aaugguuagaaaaacugaaauu

SEQ ID NO: 11672 - RNA, 22 nt, Artificial Sequence
  SAMD9 targeting guide sequence portion
aauuucaguuuuucuaaccauu

SEQ ID NO: 11673 - RNA, 22 nt, Artificial Sequence
  SAMD9 targeting guide sequence portion
agcaaugguuagaaaaacugaa

SEQ ID NO: 11674 - RNA, 22 nt, Artificial Sequence
  SAMD9 targeting guide sequence portion
aguuuuucuaaccauugcuaua

SEQ ID NO: 11675 - RNA, 22 nt, Artificial Sequence
  SAMD9 targeting guide sequence portion
auagcaaugguuagaaaaacug

SEQ ID NO: 11676 - RNA, 22 nt, Artificial Sequence
  SAMD9 targeting guide sequence portion
auauagcaaugguuagaaaaac

SEQ ID NO: 11677 - RNA, 22 nt, Artificial Sequence
  SAMD9 targeting guide sequence portion
augguuagaaaaacugaaauuc

SEQ ID NO: 11678 - RNA, 22 nt, Artificial Sequence
  SAMD9 targeting guide sequence portion
auuucaguuuuucuaaccauug

SEQ ID NO: 11679 - RNA, 22 nt, Artificial Sequence
  SAMD9 targeting guide sequence portion
caaugguuagaaaaacugaaau

SEQ ID NO: 11680 - RNA, 22 nt, Artificial Sequence
  SAMD9 targeting guide sequence portion
caguuuuucuaaccauugcuau

SEQ ID NO: 11681 - RNA, 22 nt, Artificial Sequence
  SAMD9 targeting guide sequence portion
gaauuucaguuuuucuaaccau

SEQ ID NO: 11682 - RNA, 22 nt, Artificial Sequence
  SAMD9 targeting guide sequence portion
gcaaugguuagaaaaacugaaa

SEQ ID NO: 11683 - RNA, 22 nt, Artificial Sequence
  SAMD9 targeting guide sequence portion
gguuagaaaaacugaaauucaa

SEQ ID NO: 11684 - RNA, 22 nt, Artificial Sequence
  SAMD9 targeting guide sequence portion
guuagaaaaacugaaauucaaa

SEQ ID NO: 11685 - RNA, 22 nt, Artificial Sequence
  SAMD9 targeting guide sequence portion
guuuuucuaaccauugcuauau

SEQ ID NO: 11686 - RNA, 22 nt, Artificial Sequence
  SAMD9 targeting guide sequence portion
uagcaaugguuagaaaaacuga

SEQ ID NO: 11687 - RNA, 22 nt, Artificial Sequence
  SAMD9 targeting guide sequence portion
uauagcaaugguuagaaaaacu

SEQ ID NO: 11688 - RNA, 22 nt, Artificial Sequence
  SAMD9 targeting guide sequence portion
ucaguuuuucuaaccauugcua

SEQ ID NO: 11689 - RNA, 22 nt, Artificial Sequence
  SAMD9 targeting guide sequence portion
ugaauuucaguuuuucuaacca

SEQ ID NO: 11690 - RNA, 22 nt, Artificial Sequence
  SAMD9 targeting guide sequence portion
ugguuagaaaaacugaaauuca

SEQ ID NO: 11691 - RNA, 22 nt, Artificial Sequence
  SAMD9 targeting guide sequence portion
uucaguuuuucuaaccauugcu

SEQ ID NO: 11692 - RNA, 22 nt, Artificial Sequence
  SAMD9 targeting guide sequence portion
uugaauuucaguuuuucuaacc

SEQ ID NO: 11693 - RNA, 22 nt, Artificial Sequence
  SAMD9 targeting guide sequence portion
uuucaguuuuucuaaccauugc

SEQ ID NO: 11694 - RNA, 22 nt, Artificial Sequence
  SAMD9 targeting guide sequence portion
uuugaauuucaguuuuucuaac

SEQ ID NO: 11695 - RNA, 20 nt, Artificial Sequence
  SAMD9 targeting guide sequence portion
aaaacaauauuucuguguau

SEQ ID NO: 11696 - RNA, 20 nt, Artificial Sequence
  SAMD9 targeting guide sequence portion
aaacaauauuucuguguauu

SEQ ID NO: 11697 - RNA, 20 nt, Artificial Sequence
  SAMD9 targeting guide sequence portion
aaauauuguuuucuaguggc

SEQ ID NO: 11698 - RNA, 20 nt, Artificial Sequence
  SAMD9 targeting guide sequence portion
aacaauauuucuguguauua

SEQ ID NO: 11699 - RNA, 20 nt, Artificial Sequence
  SAMD9 targeting guide sequence portion
aauaauacacagaaauauug

SEQ ID NO: 11700 - RNA, 20 nt, Artificial Sequence
  SAMD9 targeting guide sequence portion
aauacacagaaauauuguuu

SEQ ID NO: 11701 - RNA, 20 nt, Artificial Sequence
  SAMD9 targeting guide sequence portion
aauauuguuuucuaguggca

SEQ ID NO: 11702 - RNA, 20 nt, Artificial Sequence
  SAMD9 targeting guide sequence portion
acaauauuucuguguauuau

SEQ ID NO: 11703 - RNA, 20 nt, Artificial Sequence
  SAMD9 targeting guide sequence portion
acacagaaauauuguuuucu

SEQ ID NO: 11704 - RNA, 20 nt, Artificial Sequence
  SAMD9 targeting guide sequence portion
acagaaauauuguuuucuag

SEQ ID NO: 11705 - RNA, 20 nt, Artificial Sequence
  SAMD9 targeting guide sequence portion
acuagaaaacaauauuucug

SEQ ID NO: 11706 - RNA, 20 nt, Artificial Sequence
  SAMD9 targeting guide sequence portion
agaaaacaauauuucugugu

SEQ ID NO: 11707 - RNA, 20 nt, Artificial Sequence
  SAMD9 targeting guide sequence portion
agaaauauuguuuucuagug

SEQ ID NO: 11708 - RNA, 20 nt, Artificial Sequence
  SAMD9 targeting guide sequence portion
aguuuguaucugccacuaga

SEQ ID NO: 11709 - RNA, 20 nt, Artificial Sequence
  SAMD9 targeting guide sequence portion
auaauacacagaaauauugu

SEQ ID NO: 11710 - RNA, 20 nt, Artificial Sequence
  SAMD9 targeting guide sequence portion
auacacagaaauauuguuuu

SEQ ID NO: 11711 - RNA, 20 nt, Artificial Sequence
  SAMD9 targeting guide sequence portion
auauuguuuucuaguggcag

SEQ ID NO: 11712 - RNA, 20 nt, Artificial Sequence
  SAMD9 targeting guide sequence portion
aucugccacuagaaaacaau

SEQ ID NO: 11713 - RNA, 20 nt, Artificial Sequence
  SAMD9 targeting guide sequence portion
augaaauaauacacagaaau

SEQ ID NO: 11714 - RNA, 20 nt, Artificial Sequence
  SAMD9 targeting guide sequence portion
auuguuuucuaguggcagau

SEQ ID NO: 11715 - RNA, 20 nt, Artificial Sequence
  SAMD9 targeting guide sequence portion
cacagaaauauuguuuucua

SEQ ID NO: 11716 - RNA, 20 nt, Artificial Sequence
  SAMD9 targeting guide sequence portion
cacuagaaaacaauauuucu

SEQ ID NO: 11717 - RNA, 20 nt, Artificial Sequence
  SAMD9 targeting guide sequence portion
cagaaauauuguuuucuagu

SEQ ID NO: 11718 - RNA, 20 nt, Artificial Sequence
  SAMD9 targeting guide sequence portion
caugaaauaauacacagaaa

SEQ ID NO: 11719 - RNA, 20 nt, Artificial Sequence
  SAMD9 targeting guide sequence portion
ccacuagaaaacaauauuuc

SEQ ID NO: 11720 - RNA, 20 nt, Artificial Sequence
  SAMD9 targeting guide sequence portion
cuagaaaacaauauuucugu

SEQ ID NO: 11721 - RNA, 20 nt, Artificial Sequence
  SAMD9 targeting guide sequence portion
cugaguuuguaucugccacu

SEQ ID NO: 11722 - RNA, 20 nt, Artificial Sequence
  SAMD9 targeting guide sequence portion
cugccacuagaaaacaauau

SEQ ID NO: 11723 - RNA, 20 nt, Artificial Sequence
  SAMD9 targeting guide sequence portion
gaaaacaauauuucugugua

SEQ ID NO: 11724 - RNA, 20 nt, Artificial Sequence
  SAMD9 targeting guide sequence portion
gaaauaauacacagaaauau

SEQ ID NO: 11725 - RNA, 20 nt, Artificial Sequence
  SAMD9 targeting guide sequence portion
gaaauauuguuuucuagugg

SEQ ID NO: 11726 - RNA, 20 nt, Artificial Sequence
  SAMD9 targeting guide sequence portion
gaguuuguaucugccacuag

SEQ ID NO: 11727 - RNA, 20 nt, Artificial Sequence
  SAMD9 targeting guide sequence portion
gccacuagaaaacaauauuu

SEQ ID NO: 11728 - RNA, 20 nt, Artificial Sequence
  SAMD9 targeting guide sequence portion
guaucugccacuagaaaaca

SEQ ID NO: 11729 - RNA, 20 nt, Artificial Sequence
  SAMD9 targeting guide sequence portion
guuuguaucugccacuagaa

SEQ ID NO: 11730 - RNA, 20 nt, Artificial Sequence
  SAMD9 targeting guide sequence portion
guuuucuaguggcagauaca

SEQ ID NO: 11731 - RNA, 20 nt, Artificial Sequence
  SAMD9 targeting guide sequence portion
uaauacacagaaauauuguu

SEQ ID NO: 11732 - RNA, 20 nt, Artificial Sequence
  SAMD9 targeting guide sequence portion
uacacagaaauauuguuuuc

SEQ ID NO: 11733 - RNA, 20 nt, Artificial Sequence
  SAMD9 targeting guide sequence portion
uagaaaacaauauuucugug

SEQ ID NO: 11734 - RNA, 20 nt, Artificial Sequence
  SAMD9 targeting guide sequence portion
uaucugccacuagaaaacaa

SEQ ID NO: 11735 - RNA, 20 nt, Artificial Sequence
  SAMD9 targeting guide sequence portion
uauuguuuucuaguggcaga

SEQ ID NO: 11736 - RNA, 20 nt, Artificial Sequence
  SAMD9 targeting guide sequence portion
ucugccacuagaaaacaaua

SEQ ID NO: 11737 - RNA, 20 nt, Artificial Sequence
  SAMD9 targeting guide sequence portion
ugaaauaauacacagaaaua

SEQ ID NO: 11738 - RNA, 20 nt, Artificial Sequence
  SAMD9 targeting guide sequence portion
ugaguuuguaucugccacua

SEQ ID NO: 11739 - RNA, 20 nt, Artificial Sequence
  SAMD9 targeting guide sequence portion
ugccacuagaaaacaauauu

SEQ ID NO: 11740 - RNA, 20 nt, Artificial Sequence
  SAMD9 targeting guide sequence portion
uguaucugccacuagaaaac

SEQ ID NO: 11741 - RNA, 20 nt, Artificial Sequence
  SAMD9 targeting guide sequence portion
uguuuucuaguggcagauac

SEQ ID NO: 11742 - RNA, 20 nt, Artificial Sequence
  SAMD9 targeting guide sequence portion
uuguaucugccacuagaaaa

SEQ ID NO: 11743 - RNA, 20 nt, Artificial Sequence
  SAMD9 targeting guide sequence portion
uuguuuucuaguggcagaua

SEQ ID NO: 11744 - RNA, 20 nt, Artificial Sequence
  SAMD9 targeting guide sequence portion
uuuguaucugccacuagaaa

SEQ ID NO: 11745 - RNA, 20 nt, Artificial Sequence
  SAMD9 targeting guide sequence portion
uuuucuaguggcagauacaa

SEQ ID NO: 11746 - RNA, 21 nt, Artificial Sequence
  SAMD9 targeting guide sequence portion
aaauauuguuuucuaguggca

SEQ ID NO: 11747 - RNA, 21 nt, Artificial Sequence
  SAMD9 targeting guide sequence portion
aauauuguuuucuaguggcag

SEQ ID NO: 11748 - RNA, 21 nt, Artificial Sequence
  SAMD9 targeting guide sequence portion
acacagaaauauuguuuucua

SEQ ID NO: 11749 - RNA, 21 nt, Artificial Sequence
  SAMD9 targeting guide sequence portion
acagaaauauuguuuucuagu

SEQ ID NO: 11750 - RNA, 21 nt, Artificial Sequence
  SAMD9 targeting guide sequence portion
acuagaaaacaauauuucugu

SEQ ID NO: 11751 - RNA, 21 nt, Artificial Sequence
  SAMD9 targeting guide sequence portion
agaaaacaauauuucugugua

SEQ ID NO: 11752 - RNA, 21 nt, Artificial Sequence
  SAMD9 targeting guide sequence portion
agaaauauuguuuucuagugg

SEQ ID NO: 11753 - RNA, 21 nt, Artificial Sequence
  SAMD9 targeting guide sequence portion
aguuuguaucugccacuagaa

SEQ ID NO: 11754 - RNA, 21 nt, Artificial Sequence
  SAMD9 targeting guide sequence portion
auacacagaaauauuguuuuc

SEQ ID NO: 11755 - RNA, 21 nt, Artificial Sequence
  SAMD9 targeting guide sequence portion
auauuguuuucuaguggcaga

SEQ ID NO: 11756 - RNA, 21 nt, Artificial Sequence
  SAMD9 targeting guide sequence portion
aucugccacuagaaaacaaua

SEQ ID NO: 11757 - RNA, 21 nt, Artificial Sequence
  SAMD9 targeting guide sequence portion
auuguuuucuaguggcagaua

SEQ ID NO: 11758 - RNA, 21 nt, Artificial Sequence
  SAMD9 targeting guide sequence portion
cacagaaauauuguuuucuag

SEQ ID NO: 11759 - RNA, 21 nt, Artificial Sequence
  SAMD9 targeting guide sequence portion
cacuagaaaacaauauuucug

SEQ ID NO: 11760 - RNA, 21 nt, Artificial Sequence
  SAMD9 targeting guide sequence portion
cagaaauauuguuuucuagug

SEQ ID NO: 11761 - RNA, 21 nt, Artificial Sequence
  SAMD9 targeting guide sequence portion
caugaaauaauacacagaaau

SEQ ID NO: 11762 - RNA, 21 nt, Artificial Sequence
  SAMD9 targeting guide sequence portion
ccacuagaaaacaauauuucu

SEQ ID NO: 11763 - RNA, 21 nt, Artificial Sequence
  SAMD9 targeting guide sequence portion
ccugaguuuguaucugccacu

SEQ ID NO: 11764 - RNA, 21 nt, Artificial Sequence
  SAMD9 targeting guide sequence portion
cuagaaaacaauauuucugug

SEQ ID NO: 11765 - RNA, 21 nt, Artificial Sequence
  SAMD9 targeting guide sequence portion
cugaguuuguaucugccacua

SEQ ID NO: 11766 - RNA, 21 nt, Artificial Sequence
  SAMD9 targeting guide sequence portion
cugccacuagaaaacaauauu

SEQ ID NO: 11767 - RNA, 21 nt, Artificial Sequence
  SAMD9 targeting guide sequence portion
gaaaacaauauuucuguguau

SEQ ID NO: 11768 - RNA, 21 nt, Artificial Sequence
  SAMD9 targeting guide sequence portion
gaaauauuguuuucuaguggc

SEQ ID NO: 11769 - RNA, 21 nt, Artificial Sequence
  SAMD9 targeting guide sequence portion
gaguuuguaucugccacuaga

SEQ ID NO: 11770 - RNA, 21 nt, Artificial Sequence
  SAMD9 targeting guide sequence portion
gccacuagaaaacaauauuuc

SEQ ID NO: 11771 - RNA, 21 nt, Artificial Sequence
  SAMD9 targeting guide sequence portion
guaucugccacuagaaaacaa

SEQ ID NO: 11772 - RNA, 21 nt, Artificial Sequence
  SAMD9 targeting guide sequence portion
guuuguaucugccacuagaaa

SEQ ID NO: 11773 - RNA, 21 nt, Artificial Sequence
  SAMD9 targeting guide sequence portion
guuuucuaguggcagauacaa

SEQ ID NO: 11774 - RNA, 21 nt, Artificial Sequence
  SAMD9 targeting guide sequence portion
uacacagaaauauuguuuucu

SEQ ID NO: 11775 - RNA, 21 nt, Artificial Sequence
  SAMD9 targeting guide sequence portion
uagaaaacaauauuucugugu

SEQ ID NO: 11776 - RNA, 21 nt, Artificial Sequence
  SAMD9 targeting guide sequence portion
uaucugccacuagaaaacaau

SEQ ID NO: 11777 - RNA, 21 nt, Artificial Sequence
  SAMD9 targeting guide sequence portion
uauuguuuucuaguggcagau

SEQ ID NO: 11778 - RNA, 21 nt, Artificial Sequence
  SAMD9 targeting guide sequence portion
ucaugaaauaauacacagaaa

SEQ ID NO: 11779 - RNA, 21 nt, Artificial Sequence
  SAMD9 targeting guide sequence portion
ucugccacuagaaaacaauau

SEQ ID NO: 11780 - RNA, 21 nt, Artificial Sequence
  SAMD9 targeting guide sequence portion
ugaguuuguaucugccacuag

SEQ ID NO: 11781 - RNA, 21 nt, Artificial Sequence
  SAMD9 targeting guide sequence portion
ugccacuagaaaacaauauuu

SEQ ID NO: 11782 - RNA, 21 nt, Artificial Sequence
  SAMD9 targeting guide sequence portion
uguaucugccacuagaaaaca

SEQ ID NO: 11783 - RNA, 21 nt, Artificial Sequence
  SAMD9 targeting guide sequence portion
uguuuucuaguggcagauaca

SEQ ID NO: 11784 - RNA, 21 nt, Artificial Sequence
  SAMD9 targeting guide sequence portion
uuguaucugccacuagaaaac

SEQ ID NO: 11785 - RNA, 21 nt, Artificial Sequence
  SAMD9 targeting guide sequence portion
uuguuuucuaguggcagauac

SEQ ID NO: 11786 - RNA, 21 nt, Artificial Sequence
  SAMD9 targeting guide sequence portion
uuuguaucugccacuagaaaa

SEQ ID NO: 11787 - RNA, 21 nt, Artificial Sequence
  SAMD9 targeting guide sequence portion
uuuucuaguggcagauacaaa

SEQ ID NO: 11788 - RNA, 22 nt, Artificial Sequence
  SAMD9 targeting guide sequence portion
aaauauuguuuucuaguggcag

SEQ ID NO: 11789 - RNA, 22 nt, Artificial Sequence
  SAMD9 targeting guide sequence portion
aauacacagaaauauuguuuuc

SEQ ID NO: 11790 - RNA, 22 nt, Artificial Sequence
  SAMD9 targeting guide sequence portion
aauauuguuuucuaguggcaga

SEQ ID NO: 11791 - RNA, 22 nt, Artificial Sequence
  SAMD9 targeting guide sequence portion
acacagaaauauuguuuucuag

SEQ ID NO: 11792 - RNA, 22 nt, Artificial Sequence
  SAMD9 targeting guide sequence portion
acagaaauauuguuuucuagug

SEQ ID NO: 11793 - RNA, 22 nt, Artificial Sequence
  SAMD9 targeting guide sequence portion
acuagaaaacaauauuucugug

SEQ ID NO: 11794 - RNA, 22 nt, Artificial Sequence
  SAMD9 targeting guide sequence portion
agaaaacaauauuucuguguau

SEQ ID NO: 11795 - RNA, 22 nt, Artificial Sequence
  SAMD9 targeting guide sequence portion
agaaauauuguuuucuaguggc

SEQ ID NO: 11796 - RNA, 22 nt, Artificial Sequence
  SAMD9 targeting guide sequence portion
aguuuguaucugccacuagaaa

SEQ ID NO: 11797 - RNA, 22 nt, Artificial Sequence
  SAMD9 targeting guide sequence portion
auacacagaaauauuguuuucu

SEQ ID NO: 11798 - RNA, 22 nt, Artificial Sequence
  SAMD9 targeting guide sequence portion
auauuguuuucuaguggcagau

SEQ ID NO: 11799 - RNA, 22 nt, Artificial Sequence
  SAMD9 targeting guide sequence portion
aucugccacuagaaaacaauau

SEQ ID NO: 11800 - RNA, 22 nt, Artificial Sequence
  SAMD9 targeting guide sequence portion
auuguuuucuaguggcagauac

SEQ ID NO: 11801 - RNA, 22 nt, Artificial Sequence
  SAMD9 targeting guide sequence portion
cacagaaauauuguuuucuagu

SEQ ID NO: 11802 - RNA, 22 nt, Artificial Sequence
  SAMD9 targeting guide sequence portion
cacuagaaaacaauauuucugu

SEQ ID NO: 11803 - RNA, 22 nt, Artificial Sequence
  SAMD9 targeting guide sequence portion
cagaaauauuguuuucuagugg

SEQ ID NO: 11804 - RNA, 22 nt, Artificial Sequence
  SAMD9 targeting guide sequence portion
caugaaauaauacacagaaaua

SEQ ID NO: 11805 - RNA, 22 nt, Artificial Sequence
  SAMD9 targeting guide sequence portion
ccacuagaaaacaauauuucug

SEQ ID NO: 11806 - RNA, 22 nt, Artificial Sequence
  SAMD9 targeting guide sequence portion
ccugaguuuguaucugccacua

SEQ ID NO: 11807 - RNA, 22 nt, Artificial Sequence
  SAMD9 targeting guide sequence portion
cuagaaaacaauauuucugugu

SEQ ID NO: 11808 - RNA, 22 nt, Artificial Sequence
  SAMD9 targeting guide sequence portion
cugaguuuguaucugccacuag

SEQ ID NO: 11809 - RNA, 22 nt, Artificial Sequence
  SAMD9 targeting guide sequence portion
cugccacuagaaaacaauauuu

SEQ ID NO: 11810 - RNA, 22 nt, Artificial Sequence
  SAMD9 targeting guide sequence portion
gaaaacaauauuucuguguauu

SEQ ID NO: 11811 - RNA, 22 nt, Artificial Sequence
  SAMD9 targeting guide sequence portion
gaaauaauacacagaaauauug

SEQ ID NO: 11812 - RNA, 22 nt, Artificial Sequence
  SAMD9 targeting guide sequence portion
gaaauauuguuuucuaguggca

SEQ ID NO: 11813 - RNA, 22 nt, Artificial Sequence
  SAMD9 targeting guide sequence portion
gaguuuguaucugccacuagaa

SEQ ID NO: 11814 - RNA, 22 nt, Artificial Sequence
  SAMD9 targeting guide sequence portion
gccacuagaaaacaauauuucu

SEQ ID NO: 11815 - RNA, 22 nt, Artificial Sequence
  SAMD9 targeting guide sequence portion
guaucugccacuagaaaacaau

SEQ ID NO: 11816 - RNA, 22 nt, Artificial Sequence
  SAMD9 targeting guide sequence portion
guuuguaucugccacuagaaaa

SEQ ID NO: 11817 - RNA, 22 nt, Artificial Sequence
  SAMD9 targeting guide sequence portion
guuuucuaguggcagauacaaa

SEQ ID NO: 11818 - RNA, 22 nt, Artificial Sequence
  SAMD9 targeting guide sequence portion
uacacagaaauauuguuuucua

SEQ ID NO: 11819 - RNA, 22 nt, Artificial Sequence
  SAMD9 targeting guide sequence portion
uagaaaacaauauuucugugua

SEQ ID NO: 11820 - RNA, 22 nt, Artificial Sequence
  SAMD9 targeting guide sequence portion
uaucugccacuagaaaacaaua

SEQ ID NO: 11821 - RNA, 22 nt, Artificial Sequence
  SAMD9 targeting guide sequence portion
uauuguuuucuaguggcagaua

SEQ ID NO: 11822 - RNA, 22 nt, Artificial Sequence
  SAMD9 targeting guide sequence portion
ucaugaaauaauacacagaaau

SEQ ID NO: 11823 - RNA, 22 nt, Artificial Sequence
  SAMD9 targeting guide sequence portion
uccugaguuuguaucugccacu

SEQ ID NO: 11824 - RNA, 22 nt, Artificial Sequence
  SAMD9 targeting guide sequence portion
ucugccacuagaaaacaauauu

SEQ ID NO: 11825 - RNA, 22 nt, Artificial Sequence
  SAMD9 targeting guide sequence portion
ugaguuuguaucugccacuaga

SEQ ID NO: 11826 - RNA, 22 nt, Artificial Sequence
  SAMD9 targeting guide sequence portion
ugccacuagaaaacaauauuuc

SEQ ID NO: 11827 - RNA, 22 nt, Artificial Sequence
  SAMD9 targeting guide sequence portion
uguaucugccacuagaaaacaa

SEQ ID NO: 11828 - RNA, 22 nt, Artificial Sequence
  SAMD9 targeting guide sequence portion
uguuuucuaguggcagauacaa

SEQ ID NO: 11829 - RNA, 22 nt, Artificial Sequence
  SAMD9 targeting guide sequence portion
uucaugaaauaauacacagaaa

SEQ ID NO: 11830 - RNA, 22 nt, Artificial Sequence
  SAMD9 targeting guide sequence portion
uuguaucugccacuagaaaaca

SEQ ID NO: 11831 - RNA, 22 nt, Artificial Sequence
  SAMD9 targeting guide sequence portion
uuguuuucuaguggcagauaca

SEQ ID NO: 11832 - RNA, 22 nt, Artificial Sequence
  SAMD9 targeting guide sequence portion
uuuguaucugccacuagaaaac

SEQ ID NO: 11833 - RNA, 22 nt, Artificial Sequence
  SAMD9 targeting guide sequence portion
uuuucuaguggcagauacaaac

SEQ ID NO: 11834 - RNA, 20 nt, Artificial Sequence
  SAMD9 targeting guide sequence portion
aaagcaauauuucuguguau

SEQ ID NO: 11835 - RNA, 20 nt, Artificial Sequence
  SAMD9 targeting guide sequence portion
aaauauugcuuucuaguggc

SEQ ID NO: 11836 - RNA, 20 nt, Artificial Sequence
  SAMD9 targeting guide sequence portion
aagcaauauuucuguguauu

SEQ ID NO: 11837 - RNA, 20 nt, Artificial Sequence
  SAMD9 targeting guide sequence portion
aauacacagaaauauugcuu

SEQ ID NO: 11838 - RNA, 20 nt, Artificial Sequence
  SAMD9 targeting guide sequence portion
aauauugcuuucuaguggca

SEQ ID NO: 11839 - RNA, 20 nt, Artificial Sequence
  SAMD9 targeting guide sequence portion
acacagaaauauugcuuucu

SEQ ID NO: 11840 - RNA, 20 nt, Artificial Sequence
  SAMD9 targeting guide sequence portion
acagaaauauugcuuucuag

SEQ ID NO: 11841 - RNA, 20 nt, Artificial Sequence
  SAMD9 targeting guide sequence portion
acuagaaagcaauauuucug

SEQ ID NO: 11842 - RNA, 20 nt, Artificial Sequence
  SAMD9 targeting guide sequence portion
agaaagcaauauuucugugu

SEQ ID NO: 11843 - RNA, 20 nt, Artificial Sequence
  SAMD9 targeting guide sequence portion
agaaauauugcuuucuagug

SEQ ID NO: 11844 - RNA, 20 nt, Artificial Sequence
  SAMD9 targeting guide sequence portion
agcaauauuucuguguauua

SEQ ID NO: 11845 - RNA, 20 nt, Artificial Sequence
  SAMD9 targeting guide sequence portion
auaauacacagaaauauugc

SEQ ID NO: 11846 - RNA, 20 nt, Artificial Sequence
  SAMD9 targeting guide sequence portion
auacacagaaauauugcuuu

SEQ ID NO: 11847 - RNA, 20 nt, Artificial Sequence
  SAMD9 targeting guide sequence portion
auauugcuuucuaguggcag

SEQ ID NO: 11848 - RNA, 20 nt, Artificial Sequence
  SAMD9 targeting guide sequence portion
aucugccacuagaaagcaau

SEQ ID NO: 11849 - RNA, 20 nt, Artificial Sequence
  SAMD9 targeting guide sequence portion
auugcuuucuaguggcagau

SEQ ID NO: 11850 - RNA, 20 nt, Artificial Sequence
  SAMD9 targeting guide sequence portion
cacagaaauauugcuuucua

SEQ ID NO: 11851 - RNA, 20 nt, Artificial Sequence
  SAMD9 targeting guide sequence portion
cacuagaaagcaauauuucu

SEQ ID NO: 11852 - RNA, 20 nt, Artificial Sequence
  SAMD9 targeting guide sequence portion
cagaaauauugcuuucuagu

SEQ ID NO: 11853 - RNA, 20 nt, Artificial Sequence
  SAMD9 targeting guide sequence portion
ccacuagaaagcaauauuuc

SEQ ID NO: 11854 - RNA, 20 nt, Artificial Sequence
  SAMD9 targeting guide sequence portion
cuagaaagcaauauuucugu

SEQ ID NO: 11855 - RNA, 20 nt, Artificial Sequence
  SAMD9 targeting guide sequence portion
cugccacuagaaagcaauau

SEQ ID NO: 11856 - RNA, 20 nt, Artificial Sequence
  SAMD9 targeting guide sequence portion
cuuucuaguggcagauacaa

SEQ ID NO: 11857 - RNA, 20 nt, Artificial Sequence
  SAMD9 targeting guide sequence portion
gaaagcaauauuucugugua

SEQ ID NO: 11858 - RNA, 20 nt, Artificial Sequence
  SAMD9 targeting guide sequence portion
gaaauauugcuuucuagugg

SEQ ID NO: 11859 - RNA, 20 nt, Artificial Sequence
  SAMD9 targeting guide sequence portion
gcaauauuucuguguauuau

SEQ ID NO: 11860 - RNA, 20 nt, Artificial Sequence
  SAMD9 targeting guide sequence portion
gccacuagaaagcaauauuu

SEQ ID NO: 11861 - RNA, 20 nt, Artificial Sequence
  SAMD9 targeting guide sequence portion
gcuuucuaguggcagauaca

SEQ ID NO: 11862 - RNA, 20 nt, Artificial Sequence
  SAMD9 targeting guide sequence portion
guaucugccacuagaaagca

SEQ ID NO: 11863 - RNA, 20 nt, Artificial Sequence
  SAMD9 targeting guide sequence portion
uaauacacagaaauauugcu

SEQ ID NO: 11864 - RNA, 20 nt, Artificial Sequence
  SAMD9 targeting guide sequence portion
uacacagaaauauugcuuuc

SEQ ID NO: 11865 - RNA, 20 nt, Artificial Sequence
  SAMD9 targeting guide sequence portion
uagaaagcaauauuucugug

SEQ ID NO: 11866 - RNA, 20 nt, Artificial Sequence
  SAMD9 targeting guide sequence portion
uaucugccacuagaaagcaa

SEQ ID NO: 11867 - RNA, 20 nt, Artificial Sequence
  SAMD9 targeting guide sequence portion
uauugcuuucuaguggcaga

SEQ ID NO: 11868 - RNA, 20 nt, Artificial Sequence
  SAMD9 targeting guide sequence portion
ucugccacuagaaagcaaua

SEQ ID NO: 11869 - RNA, 20 nt, Artificial Sequence
  SAMD9 targeting guide sequence portion
ugccacuagaaagcaauauu

SEQ ID NO: 11870 - RNA, 20 nt, Artificial Sequence
  SAMD9 targeting guide sequence portion
ugcuuucuaguggcagauac

SEQ ID NO: 11871 - RNA, 20 nt, Artificial Sequence
  SAMD9 targeting guide sequence portion
uguaucugccacuagaaagc

SEQ ID NO: 11872 - RNA, 20 nt, Artificial Sequence
  SAMD9 targeting guide sequence portion
uugcuuucuaguggcagaua

SEQ ID NO: 11873 - RNA, 20 nt, Artificial Sequence
  SAMD9 targeting guide sequence portion
uuguaucugccacuagaaag

SEQ ID NO: 11874 - RNA, 21 nt, Artificial Sequence
  SAMD9 targeting guide sequence portion
aaagcaauauuucuguguauu

SEQ ID NO: 11875 - RNA, 21 nt, Artificial Sequence
  SAMD9 targeting guide sequence portion
aaauauugcuuucuaguggca

SEQ ID NO: 11876 - RNA, 21 nt, Artificial Sequence
  SAMD9 targeting guide sequence portion
aagcaauauuucuguguauua

SEQ ID NO: 11877 - RNA, 21 nt, Artificial Sequence
  SAMD9 targeting guide sequence portion
aauaauacacagaaauauugc

SEQ ID NO: 11878 - RNA, 21 nt, Artificial Sequence
  SAMD9 targeting guide sequence portion
aauacacagaaauauugcuuu

SEQ ID NO: 11879 - RNA, 21 nt, Artificial Sequence
  SAMD9 targeting guide sequence portion
aauauugcuuucuaguggcag

SEQ ID NO: 11880 - RNA, 21 nt, Artificial Sequence
  SAMD9 targeting guide sequence portion
acacagaaauauugcuuucua

SEQ ID NO: 11881 - RNA, 21 nt, Artificial Sequence
  SAMD9 targeting guide sequence portion
acagaaauauugcuuucuagu

SEQ ID NO: 11882 - RNA, 21 nt, Artificial Sequence
  SAMD9 targeting guide sequence portion
acuagaaagcaauauuucugu

SEQ ID NO: 11883 - RNA, 21 nt, Artificial Sequence
  SAMD9 targeting guide sequence portion
agaaagcaauauuucugugua

SEQ ID NO: 11884 - RNA, 21 nt, Artificial Sequence
  SAMD9 targeting guide sequence portion
agaaauauugcuuucuagugg

SEQ ID NO: 11885 - RNA, 21 nt, Artificial Sequence
  SAMD9 targeting guide sequence portion
agcaauauuucuguguauuau

SEQ ID NO: 11886 - RNA, 21 nt, Artificial Sequence
  SAMD9 targeting guide sequence portion
auaauacacagaaauauugcu

SEQ ID NO: 11887 - RNA, 21 nt, Artificial Sequence
  SAMD9 targeting guide sequence portion
auacacagaaauauugcuuuc

SEQ ID NO: 11888 - RNA, 21 nt, Artificial Sequence
  SAMD9 targeting guide sequence portion
auauugcuuucuaguggcaga

SEQ ID NO: 11889 - RNA, 21 nt, Artificial Sequence
  SAMD9 targeting guide sequence portion
aucugccacuagaaagcaaua

SEQ ID NO: 11890 - RNA, 21 nt, Artificial Sequence
  SAMD9 targeting guide sequence portion
auugcuuucuaguggcagaua

SEQ ID NO: 11891 - RNA, 21 nt, Artificial Sequence
  SAMD9 targeting guide sequence portion
cacagaaauauugcuuucuag

SEQ ID NO: 11892 - RNA, 21 nt, Artificial Sequence
  SAMD9 targeting guide sequence portion
cacuagaaagcaauauuucug

SEQ ID NO: 11893 - RNA, 21 nt, Artificial Sequence
  SAMD9 targeting guide sequence portion
cagaaauauugcuuucuagug

SEQ ID NO: 11894 - RNA, 21 nt, Artificial Sequence
  SAMD9 targeting guide sequence portion
ccacuagaaagcaauauuucu

SEQ ID NO: 11895 - RNA, 21 nt, Artificial Sequence
  SAMD9 targeting guide sequence portion
cuagaaagcaauauuucugug

SEQ ID NO: 11896 - RNA, 21 nt, Artificial Sequence
  SAMD9 targeting guide sequence portion
cugccacuagaaagcaauauu

SEQ ID NO: 11897 - RNA, 21 nt, Artificial Sequence
  SAMD9 targeting guide sequence portion
cuuucuaguggcagauacaaa

SEQ ID NO: 11898 - RNA, 21 nt, Artificial Sequence
  SAMD9 targeting guide sequence portion
gaaagcaauauuucuguguau

SEQ ID NO: 11899 - RNA, 21 nt, Artificial Sequence
  SAMD9 targeting guide sequence portion
gaaauauugcuuucuaguggc

SEQ ID NO: 11900 - RNA, 21 nt, Artificial Sequence
  SAMD9 targeting guide sequence portion
gcaauauuucuguguauuauu

SEQ ID NO: 11901 - RNA, 21 nt, Artificial Sequence
  SAMD9 targeting guide sequence portion
gccacuagaaagcaauauuuc

SEQ ID NO: 11902 - RNA, 21 nt, Artificial Sequence
  SAMD9 targeting guide sequence portion
gcuuucuaguggcagauacaa

SEQ ID NO: 11903 - RNA, 21 nt, Artificial Sequence
  SAMD9 targeting guide sequence portion
guaucugccacuagaaagcaa

SEQ ID NO: 11904 - RNA, 21 nt, Artificial Sequence
  SAMD9 targeting guide sequence portion
uaauacacagaaauauugcuu

SEQ ID NO: 11905 - RNA, 21 nt, Artificial Sequence
  SAMD9 targeting guide sequence portion
uacacagaaauauugcuuucu

SEQ ID NO: 11906 - RNA, 21 nt, Artificial Sequence
  SAMD9 targeting guide sequence portion
uagaaagcaauauuucugugu

SEQ ID NO: 11907 - RNA, 21 nt, Artificial Sequence
  SAMD9 targeting guide sequence portion
uaucugccacuagaaagcaau

SEQ ID NO: 11908 - RNA, 21 nt, Artificial Sequence
  SAMD9 targeting guide sequence portion
uauugcuuucuaguggcagau

SEQ ID NO: 11909 - RNA, 21 nt, Artificial Sequence
  SAMD9 targeting guide sequence portion
ucugccacuagaaagcaauau

SEQ ID NO: 11910 - RNA, 21 nt, Artificial Sequence
  SAMD9 targeting guide sequence portion
ugccacuagaaagcaauauuu

SEQ ID NO: 11911 - RNA, 21 nt, Artificial Sequence
  SAMD9 targeting guide sequence portion
ugcuuucuaguggcagauaca

SEQ ID NO: 11912 - RNA, 21 nt, Artificial Sequence
  SAMD9 targeting guide sequence portion
uguaucugccacuagaaagca

SEQ ID NO: 11913 - RNA, 21 nt, Artificial Sequence
  SAMD9 targeting guide sequence portion
uugcuuucuaguggcagauac

SEQ ID NO: 11914 - RNA, 21 nt, Artificial Sequence
  SAMD9 targeting guide sequence portion
uuguaucugccacuagaaagc

SEQ ID NO: 11915 - RNA, 21 nt, Artificial Sequence
  SAMD9 targeting guide sequence portion
uuuguaucugccacuagaaag

SEQ ID NO: 11916 - RNA, 22 nt, Artificial Sequence
  SAMD9 targeting guide sequence portion
aaagcaauauuucuguguauua

SEQ ID NO: 11917 - RNA, 22 nt, Artificial Sequence
  SAMD9 targeting guide sequence portion
aaauaauacacagaaauauugc

SEQ ID NO: 11918 - RNA, 22 nt, Artificial Sequence
  SAMD9 targeting guide sequence portion
aaauauugcuuucuaguggcag

SEQ ID NO: 11919 - RNA, 22 nt, Artificial Sequence
  SAMD9 targeting guide sequence portion
aagcaauauuucuguguauuau

SEQ ID NO: 11920 - RNA, 22 nt, Artificial Sequence
  SAMD9 targeting guide sequence portion
aauaauacacagaaauauugcu

SEQ ID NO: 11921 - RNA, 22 nt, Artificial Sequence
  SAMD9 targeting guide sequence portion
aauacacagaaauauugcuuuc

SEQ ID NO: 11922 - RNA, 22 nt, Artificial Sequence
  SAMD9 targeting guide sequence portion
aauauugcuuucuaguggcaga

SEQ ID NO: 11923 - RNA, 22 nt, Artificial Sequence
  SAMD9 targeting guide sequence portion
acacagaaauauugcuuucuag

SEQ ID NO: 11924 - RNA, 22 nt, Artificial Sequence
  SAMD9 targeting guide sequence portion
acagaaauauugcuuucuagug

SEQ ID NO: 11925 - RNA, 22 nt, Artificial Sequence
  SAMD9 targeting guide sequence portion
acuagaaagcaauauuucugug

SEQ ID NO: 11926 - RNA, 22 nt, Artificial Sequence
  SAMD9 targeting guide sequence portion
agaaagcaauauuucuguguau

SEQ ID NO: 11927 - RNA, 22 nt, Artificial Sequence
  SAMD9 targeting guide sequence portion
agaaauauugcuuucuaguggc

SEQ ID NO: 11928 - RNA, 22 nt, Artificial Sequence
  SAMD9 targeting guide sequence portion
agcaauauuucuguguauuauu

SEQ ID NO: 11929 - RNA, 22 nt, Artificial Sequence
  SAMD9 targeting guide sequence portion
auaauacacagaaauauugcuu

SEQ ID NO: 11930 - RNA, 22 nt, Artificial Sequence
  SAMD9 targeting guide sequence portion
auacacagaaauauugcuuucu

SEQ ID NO: 11931 - RNA, 22 nt, Artificial Sequence
  SAMD9 targeting guide sequence portion
auauugcuuucuaguggcagau

SEQ ID NO: 11932 - RNA, 22 nt, Artificial Sequence
  SAMD9 targeting guide sequence portion
aucugccacuagaaagcaauau

SEQ ID NO: 11933 - RNA, 22 nt, Artificial Sequence
  SAMD9 targeting guide sequence portion
auugcuuucuaguggcagauac

SEQ ID NO: 11934 - RNA, 22 nt, Artificial Sequence
  SAMD9 targeting guide sequence portion
cacagaaauauugcuuucuagu

SEQ ID NO: 11935 - RNA, 22 nt, Artificial Sequence
  SAMD9 targeting guide sequence portion
cacuagaaagcaauauuucugu

SEQ ID NO: 11936 - RNA, 22 nt, Artificial Sequence
  SAMD9 targeting guide sequence portion
cagaaauauugcuuucuagugg

SEQ ID NO: 11937 - RNA, 22 nt, Artificial Sequence
  SAMD9 targeting guide sequence portion
ccacuagaaagcaauauuucug

SEQ ID NO: 11938 - RNA, 22 nt, Artificial Sequence
  SAMD9 targeting guide sequence portion
cuagaaagcaauauuucugugu

SEQ ID NO: 11939 - RNA, 22 nt, Artificial Sequence
  SAMD9 targeting guide sequence portion
cugccacuagaaagcaauauuu

SEQ ID NO: 11940 - RNA, 22 nt, Artificial Sequence
  SAMD9 targeting guide sequence portion
cuuucuaguggcagauacaaac

SEQ ID NO: 11941 - RNA, 22 nt, Artificial Sequence
  SAMD9 targeting guide sequence portion
gaaagcaauauuucuguguauu

SEQ ID NO: 11942 - RNA, 22 nt, Artificial Sequence
  SAMD9 targeting guide sequence portion
gaaauauugcuuucuaguggca

SEQ ID NO: 11943 - RNA, 22 nt, Artificial Sequence
  SAMD9 targeting guide sequence portion
gcaauauuucuguguauuauuu

SEQ ID NO: 11944 - RNA, 22 nt, Artificial Sequence
  SAMD9 targeting guide sequence portion
gccacuagaaagcaauauuucu

SEQ ID NO: 11945 - RNA, 22 nt, Artificial Sequence
  SAMD9 targeting guide sequence portion
gcuuucuaguggcagauacaaa

SEQ ID NO: 11946 - RNA, 22 nt, Artificial Sequence
  SAMD9 targeting guide sequence portion
guaucugccacuagaaagcaau

SEQ ID NO: 11947 - RNA, 22 nt, Artificial Sequence
  SAMD9 targeting guide sequence portion
guuuguaucugccacuagaaag

SEQ ID NO: 11948 - RNA, 22 nt, Artificial Sequence
  SAMD9 targeting guide sequence portion
uaauacacagaaauauugcuuu

SEQ ID NO: 11949 - RNA, 22 nt, Artificial Sequence
  SAMD9 targeting guide sequence portion
uacacagaaauauugcuuucua

SEQ ID NO: 11950 - RNA, 22 nt, Artificial Sequence
  SAMD9 targeting guide sequence portion
uagaaagcaauauuucugugua

SEQ ID NO: 11951 - RNA, 22 nt, Artificial Sequence
  SAMD9 targeting guide sequence portion
uaucugccacuagaaagcaaua

SEQ ID NO: 11952 - RNA, 22 nt, Artificial Sequence
  SAMD9 targeting guide sequence portion
uauugcuuucuaguggcagaua

SEQ ID NO: 11953 - RNA, 22 nt, Artificial Sequence
  SAMD9 targeting guide sequence portion
ucugccacuagaaagcaauauu

SEQ ID NO: 11954 - RNA, 22 nt, Artificial Sequence
  SAMD9 targeting guide sequence portion
ugccacuagaaagcaauauuuc

SEQ ID NO: 11955 - RNA, 22 nt, Artificial Sequence
  SAMD9 targeting guide sequence portion
ugcuuucuaguggcagauacaa

SEQ ID NO: 11956 - RNA, 22 nt, Artificial Sequence
  SAMD9 targeting guide sequence portion
uguaucugccacuagaaagcaa

SEQ ID NO: 11957 - RNA, 22 nt, Artificial Sequence
  SAMD9 targeting guide sequence portion
uugcuuucuaguggcagauaca

SEQ ID NO: 11958 - RNA, 22 nt, Artificial Sequence
  SAMD9 targeting guide sequence portion
uuguaucugccacuagaaagca

SEQ ID NO: 11959 - RNA, 22 nt, Artificial Sequence
  SAMD9 targeting guide sequence portion
uuuguaucugccacuagaaagc

SEQ ID NO: 11960 - RNA, 20 nt, Artificial Sequence
  SAMD9 targeting guide sequence portion
aacuacgguauacauagaaa

SEQ ID NO: 11961 - RNA, 20 nt, Artificial Sequence
  SAMD9 targeting guide sequence portion
accguaguuacauaugaaaa

SEQ ID NO: 11962 - RNA, 20 nt, Artificial Sequence
  SAMD9 targeting guide sequence portion
acgguauacauagaaaguga

SEQ ID NO: 11963 - RNA, 20 nt, Artificial Sequence
  SAMD9 targeting guide sequence portion
acuacgguauacauagaaag

SEQ ID NO: 11964 - RNA, 20 nt, Artificial Sequence
  SAMD9 targeting guide sequence portion
acuuucuauguauaccguag

SEQ ID NO: 11965 - RNA, 20 nt, Artificial Sequence
  SAMD9 targeting guide sequence portion
auaccguaguuacauaugaa

SEQ ID NO: 11966 - RNA, 20 nt, Artificial Sequence
  SAMD9 targeting guide sequence portion
auauguaacuacgguauaca

SEQ ID NO: 11967 - RNA, 20 nt, Artificial Sequence
  SAMD9 targeting guide sequence portion
auguaacuacgguauacaua

SEQ ID NO: 11968 - RNA, 20 nt, Artificial Sequence
  SAMD9 targeting guide sequence portion
auguauaccguaguuacaua

SEQ ID NO: 11969 - RNA, 20 nt, Artificial Sequence
  SAMD9 targeting guide sequence portion
auucacuuucuauguauacc

SEQ ID NO: 11970 - RNA, 20 nt, Artificial Sequence
  SAMD9 targeting guide sequence portion
cacuuucuauguauaccgua

SEQ ID NO: 11971 - RNA, 20 nt, Artificial Sequence
  SAMD9 targeting guide sequence portion
cauauguaacuacgguauac

SEQ ID NO: 11972 - RNA, 20 nt, Artificial Sequence
  SAMD9 targeting guide sequence portion
ccguaguuacauaugaaaaa

SEQ ID NO: 11973 - RNA, 20 nt, Artificial Sequence
  SAMD9 targeting guide sequence portion
cgguauacauagaaagugaa

SEQ ID NO: 11974 - RNA, 20 nt, Artificial Sequence
  SAMD9 targeting guide sequence portion
cguaguuacauaugaaaaaa

SEQ ID NO: 11975 - RNA, 20 nt, Artificial Sequence
  SAMD9 targeting guide sequence portion
cuacgguauacauagaaagu

SEQ ID NO: 11976 - RNA, 20 nt, Artificial Sequence
  SAMD9 targeting guide sequence portion
cuauguauaccguaguuaca

SEQ ID NO: 11977 - RNA, 20 nt, Artificial Sequence
  SAMD9 targeting guide sequence portion
cuuauucacuuucuauguau

SEQ ID NO: 11978 - RNA, 20 nt, Artificial Sequence
  SAMD9 targeting guide sequence portion
cuuucuauguauaccguagu

SEQ ID NO: 11979 - RNA, 20 nt, Artificial Sequence
  SAMD9 targeting guide sequence portion
gcuuauucacuuucuaugua

SEQ ID NO: 11980 - RNA, 20 nt, Artificial Sequence
  SAMD9 targeting guide sequence portion
guaacuacgguauacauaga

SEQ ID NO: 11981 - RNA, 20 nt, Artificial Sequence
  SAMD9 targeting guide sequence portion
guauaccguaguuacauaug

SEQ ID NO: 11982 - RNA, 20 nt, Artificial Sequence
  SAMD9 targeting guide sequence portion
uaacuacgguauacauagaa

SEQ ID NO: 11983 - RNA, 20 nt, Artificial Sequence
  SAMD9 targeting guide sequence portion
uaccguaguuacauaugaaa

SEQ ID NO: 11984 - RNA, 20 nt, Artificial Sequence
  SAMD9 targeting guide sequence portion
uacgguauacauagaaagug

SEQ ID NO: 11985 - RNA, 20 nt, Artificial Sequence
  SAMD9 targeting guide sequence portion
uauaccguaguuacauauga

SEQ ID NO: 11986 - RNA, 20 nt, Artificial Sequence
  SAMD9 targeting guide sequence portion
uauguaacuacgguauacau

SEQ ID NO: 11987 - RNA, 20 nt, Artificial Sequence
  SAMD9 targeting guide sequence portion
uauguauaccguaguuacau

SEQ ID NO: 11988 - RNA, 20 nt, Artificial Sequence
  SAMD9 targeting guide sequence portion
uauucacuuucuauguauac

SEQ ID NO: 11989 - RNA, 20 nt, Artificial Sequence
  SAMD9 targeting guide sequence portion
ucacuuucuauguauaccgu

SEQ ID NO: 11990 - RNA, 20 nt, Artificial Sequence
  SAMD9 targeting guide sequence portion
ucauauguaacuacgguaua

SEQ ID NO: 11991 - RNA, 20 nt, Artificial Sequence
  SAMD9 targeting guide sequence portion
ucuauguauaccguaguuac

SEQ ID NO: 11992 - RNA, 20 nt, Artificial Sequence
  SAMD9 targeting guide sequence portion
ugcuuauucacuuucuaugu

SEQ ID NO: 11993 - RNA, 20 nt, Artificial Sequence
  SAMD9 targeting guide sequence portion
uguaacuacgguauacauag

SEQ ID NO: 11994 - RNA, 20 nt, Artificial Sequence
  SAMD9 targeting guide sequence portion
uguauaccguaguuacauau

SEQ ID NO: 11995 - RNA, 20 nt, Artificial Sequence
  SAMD9 targeting guide sequence portion
uuauucacuuucuauguaua

SEQ ID NO: 11996 - RNA, 20 nt, Artificial Sequence
  SAMD9 targeting guide sequence portion
uucacuuucuauguauaccg

SEQ ID NO: 11997 - RNA, 20 nt, Artificial Sequence
  SAMD9 targeting guide sequence portion
uucauauguaacuacgguau

SEQ ID NO: 11998 - RNA, 20 nt, Artificial Sequence
  SAMD9 targeting guide sequence portion
uucuauguauaccguaguua

SEQ ID NO: 11999 - RNA, 20 nt, Artificial Sequence
  SAMD9 targeting guide sequence portion
uuucauauguaacuacggua

SEQ ID NO: 12000 - RNA, 20 nt, Artificial Sequence
  SAMD9 targeting guide sequence portion
uuucuauguauaccguaguu

SEQ ID NO: 12001 - RNA, 20 nt, Artificial Sequence
  SAMD9 targeting guide sequence portion
uuuucauauguaacuacggu

SEQ ID NO: 12002 - RNA, 20 nt, Artificial Sequence
  SAMD9 targeting guide sequence portion
uuuuucauauguaacuacgg

SEQ ID NO: 12003 - RNA, 20 nt, Artificial Sequence
  SAMD9 targeting guide sequence portion
uuuuuucauauguaacuacg

SEQ ID NO: 12004 - RNA, 21 nt, Artificial Sequence
  SAMD9 targeting guide sequence portion
aacuacgguauacauagaaag

SEQ ID NO: 12005 - RNA, 21 nt, Artificial Sequence
  SAMD9 targeting guide sequence portion
accguaguuacauaugaaaaa

SEQ ID NO: 12006 - RNA, 21 nt, Artificial Sequence
  SAMD9 targeting guide sequence portion
acgguauacauagaaagugaa

SEQ ID NO: 12007 - RNA, 21 nt, Artificial Sequence
  SAMD9 targeting guide sequence portion
acuacgguauacauagaaagu

SEQ ID NO: 12008 - RNA, 21 nt, Artificial Sequence
  SAMD9 targeting guide sequence portion
acuuucuauguauaccguagu

SEQ ID NO: 12009 - RNA, 21 nt, Artificial Sequence
  SAMD9 targeting guide sequence portion
auaccguaguuacauaugaaa

SEQ ID NO: 12010 - RNA, 21 nt, Artificial Sequence
  SAMD9 targeting guide sequence portion
auauguaacuacgguauacau

SEQ ID NO: 12011 - RNA, 21 nt, Artificial Sequence
  SAMD9 targeting guide sequence portion
auguaacuacgguauacauag

SEQ ID NO: 12012 - RNA, 21 nt, Artificial Sequence
  SAMD9 targeting guide sequence portion
auguauaccguaguuacauau

SEQ ID NO: 12013 - RNA, 21 nt, Artificial Sequence
  SAMD9 targeting guide sequence portion
auucacuuucuauguauaccg

SEQ ID NO: 12014 - RNA, 21 nt, Artificial Sequence
  SAMD9 targeting guide sequence portion
cacuuucuauguauaccguag

SEQ ID NO: 12015 - RNA, 21 nt, Artificial Sequence
  SAMD9 targeting guide sequence portion
cauauguaacuacgguauaca

SEQ ID NO: 12016 - RNA, 21 nt, Artificial Sequence
  SAMD9 targeting guide sequence portion
ccguaguuacauaugaaaaaa

SEQ ID NO: 12017 - RNA, 21 nt, Artificial Sequence
  SAMD9 targeting guide sequence portion
cgguauacauagaaagugaau

SEQ ID NO: 12018 - RNA, 21 nt, Artificial Sequence
  SAMD9 targeting guide sequence portion
cuacgguauacauagaaagug

SEQ ID NO: 12019 - RNA, 21 nt, Artificial Sequence
  SAMD9 targeting guide sequence portion
cuauguauaccguaguuacau

SEQ ID NO: 12020 - RNA, 21 nt, Artificial Sequence
  SAMD9 targeting guide sequence portion
cuuauucacuuucuauguaua

SEQ ID NO: 12021 - RNA, 21 nt, Artificial Sequence
  SAMD9 targeting guide sequence portion
cuuucuauguauaccguaguu

SEQ ID NO: 12022 - RNA, 21 nt, Artificial Sequence
  SAMD9 targeting guide sequence portion
gcuuauucacuuucuauguau

SEQ ID NO: 12023 - RNA, 21 nt, Artificial Sequence
  SAMD9 targeting guide sequence portion
guaacuacgguauacauagaa

SEQ ID NO: 12024 - RNA, 21 nt, Artificial Sequence
  SAMD9 targeting guide sequence portion
guauaccguaguuacauauga

SEQ ID NO: 12025 - RNA, 21 nt, Artificial Sequence
  SAMD9 targeting guide sequence portion
uaacuacgguauacauagaaa

SEQ ID NO: 12026 - RNA, 21 nt, Artificial Sequence
  SAMD9 targeting guide sequence portion
uaccguaguuacauaugaaaa

SEQ ID NO: 12027 - RNA, 21 nt, Artificial Sequence
  SAMD9 targeting guide sequence portion
uacgguauacauagaaaguga

SEQ ID NO: 12028 - RNA, 21 nt, Artificial Sequence
  SAMD9 targeting guide sequence portion
uauaccguaguuacauaugaa

SEQ ID NO: 12029 - RNA, 21 nt, Artificial Sequence
  SAMD9 targeting guide sequence portion
uauguaacuacgguauacaua

SEQ ID NO: 12030 - RNA, 21 nt, Artificial Sequence
  SAMD9 targeting guide sequence portion
uauguauaccguaguuacaua

SEQ ID NO: 12031 - RNA, 21 nt, Artificial Sequence
  SAMD9 targeting guide sequence portion
uauucacuuucuauguauacc

SEQ ID NO: 12032 - RNA, 21 nt, Artificial Sequence
  SAMD9 targeting guide sequence portion
ucacuuucuauguauaccgua

SEQ ID NO: 12033 - RNA, 21 nt, Artificial Sequence
  SAMD9 targeting guide sequence portion
ucauauguaacuacgguauac

SEQ ID NO: 12034 - RNA, 21 nt, Artificial Sequence
  SAMD9 targeting guide sequence portion
ucuauguauaccguaguuaca

SEQ ID NO: 12035 - RNA, 21 nt, Artificial Sequence
  SAMD9 targeting guide sequence portion
ugcuuauucacuuucuaugua

SEQ ID NO: 12036 - RNA, 21 nt, Artificial Sequence
  SAMD9 targeting guide sequence portion
uguaacuacgguauacauaga

SEQ ID NO: 12037 - RNA, 21 nt, Artificial Sequence
  SAMD9 targeting guide sequence portion
uguauaccguaguuacauaug

SEQ ID NO: 12038 - RNA, 21 nt, Artificial Sequence
  SAMD9 targeting guide sequence portion
uuauucacuuucuauguauac

SEQ ID NO: 12039 - RNA, 21 nt, Artificial Sequence
  SAMD9 targeting guide sequence portion
uucacuuucuauguauaccgu

SEQ ID NO: 12040 - RNA, 21 nt, Artificial Sequence
  SAMD9 targeting guide sequence portion
uucauauguaacuacgguaua

SEQ ID NO: 12041 - RNA, 21 nt, Artificial Sequence
  SAMD9 targeting guide sequence portion
uucuauguauaccguaguuac

SEQ ID NO: 12042 - RNA, 21 nt, Artificial Sequence
  SAMD9 targeting guide sequence portion
uugcuuauucacuuucuaugu

SEQ ID NO: 12043 - RNA, 21 nt, Artificial Sequence
  SAMD9 targeting guide sequence portion
uuucauauguaacuacgguau

SEQ ID NO: 12044 - RNA, 21 nt, Artificial Sequence
  SAMD9 targeting guide sequence portion
uuucuauguauaccguaguua

SEQ ID NO: 12045 - RNA, 21 nt, Artificial Sequence
  SAMD9 targeting guide sequence portion
uuuucauauguaacuacggua

SEQ ID NO: 12046 - RNA, 21 nt, Artificial Sequence
  SAMD9 targeting guide sequence portion
uuuuucauauguaacuacggu

SEQ ID NO: 12047 - RNA, 21 nt, Artificial Sequence
  SAMD9 targeting guide sequence portion
uuuuuucauauguaacuacgg

SEQ ID NO: 12048 - RNA, 22 nt, Artificial Sequence
  SAMD9 targeting guide sequence portion
aacuacgguauacauagaaagu

SEQ ID NO: 12049 - RNA, 22 nt, Artificial Sequence
  SAMD9 targeting guide sequence portion
accguaguuacauaugaaaaaa

SEQ ID NO: 12050 - RNA, 22 nt, Artificial Sequence
  SAMD9 targeting guide sequence portion
acgguauacauagaaagugaau

SEQ ID NO: 12051 - RNA, 22 nt, Artificial Sequence
  SAMD9 targeting guide sequence portion
acuacgguauacauagaaagug

SEQ ID NO: 12052 - RNA, 22 nt, Artificial Sequence
  SAMD9 targeting guide sequence portion
acuuucuauguauaccguaguu

SEQ ID NO: 12053 - RNA, 22 nt, Artificial Sequence
  SAMD9 targeting guide sequence portion
auaccguaguuacauaugaaaa

SEQ ID NO: 12054 - RNA, 22 nt, Artificial Sequence
  SAMD9 targeting guide sequence portion
auauguaacuacgguauacaua

SEQ ID NO: 12055 - RNA, 22 nt, Artificial Sequence
  SAMD9 targeting guide sequence portion
auguaacuacgguauacauaga

SEQ ID NO: 12056 - RNA, 22 nt, Artificial Sequence
  SAMD9 targeting guide sequence portion
auguauaccguaguuacauaug

SEQ ID NO: 12057 - RNA, 22 nt, Artificial Sequence
  SAMD9 targeting guide sequence portion
auucacuuucuauguauaccgu

SEQ ID NO: 12058 - RNA, 22 nt, Artificial Sequence
  SAMD9 targeting guide sequence portion
cacuuucuauguauaccguagu

SEQ ID NO: 12059 - RNA, 22 nt, Artificial Sequence
  SAMD9 targeting guide sequence portion
cauauguaacuacgguauacau

SEQ ID NO: 12060 - RNA, 22 nt, Artificial Sequence
  SAMD9 targeting guide sequence portion
cgguauacauagaaagugaaua

SEQ ID NO: 12061 - RNA, 22 nt, Artificial Sequence
  SAMD9 targeting guide sequence portion
cuacgguauacauagaaaguga

SEQ ID NO: 12062 - RNA, 22 nt, Artificial Sequence
  SAMD9 targeting guide sequence portion
cuauguauaccguaguuacaua

SEQ ID NO: 12063 - RNA, 22 nt, Artificial Sequence
  SAMD9 targeting guide sequence portion
cuuauucacuuucuauguauac

SEQ ID NO: 12064 - RNA, 22 nt, Artificial Sequence
  SAMD9 targeting guide sequence portion
cuuucuauguauaccguaguua

SEQ ID NO: 12065 - RNA, 22 nt, Artificial Sequence
  SAMD9 targeting guide sequence portion
gcuuauucacuuucuauguaua

SEQ ID NO: 12066 - RNA, 22 nt, Artificial Sequence
  SAMD9 targeting guide sequence portion
guaacuacgguauacauagaaa

SEQ ID NO: 12067 - RNA, 22 nt, Artificial Sequence
  SAMD9 targeting guide sequence portion
guauaccguaguuacauaugaa

SEQ ID NO: 12068 - RNA, 22 nt, Artificial Sequence
  SAMD9 targeting guide sequence portion
guugcuuauucacuuucuaugu

SEQ ID NO: 12069 - RNA, 22 nt, Artificial Sequence
  SAMD9 targeting guide sequence portion
uaacuacgguauacauagaaag

SEQ ID NO: 12070 - RNA, 22 nt, Artificial Sequence
  SAMD9 targeting guide sequence portion
uaccguaguuacauaugaaaaa

SEQ ID NO: 12071 - RNA, 22 nt, Artificial Sequence
  SAMD9 targeting guide sequence portion
uacgguauacauagaaagugaa

SEQ ID NO: 12072 - RNA, 22 nt, Artificial Sequence
  SAMD9 targeting guide sequence portion
uauaccguaguuacauaugaaa

SEQ ID NO: 12073 - RNA, 22 nt, Artificial Sequence
  SAMD9 targeting guide sequence portion
uauguaacuacgguauacauag

SEQ ID NO: 12074 - RNA, 22 nt, Artificial Sequence
  SAMD9 targeting guide sequence portion
uauguauaccguaguuacauau

SEQ ID NO: 12075 - RNA, 22 nt, Artificial Sequence
  SAMD9 targeting guide sequence portion
uauucacuuucuauguauaccg

SEQ ID NO: 12076 - RNA, 22 nt, Artificial Sequence
  SAMD9 targeting guide sequence portion
ucacuuucuauguauaccguag

SEQ ID NO: 12077 - RNA, 22 nt, Artificial Sequence
  SAMD9 targeting guide sequence portion
ucauauguaacuacgguauaca

SEQ ID NO: 12078 - RNA, 22 nt, Artificial Sequence
  SAMD9 targeting guide sequence portion
ucuauguauaccguaguuacau

SEQ ID NO: 12079 - RNA, 22 nt, Artificial Sequence
  SAMD9 targeting guide sequence portion
ugcuuauucacuuucuauguau

SEQ ID NO: 12080 - RNA, 22 nt, Artificial Sequence
  SAMD9 targeting guide sequence portion
uguaacuacgguauacauagaa

SEQ ID NO: 12081 - RNA, 22 nt, Artificial Sequence
  SAMD9 targeting guide sequence portion
uguauaccguaguuacauauga

SEQ ID NO: 12082 - RNA, 22 nt, Artificial Sequence
  SAMD9 targeting guide sequence portion
uuauucacuuucuauguauacc

SEQ ID NO: 12083 - RNA, 22 nt, Artificial Sequence
  SAMD9 targeting guide sequence portion
uucacuuucuauguauaccgua

SEQ ID NO: 12084 - RNA, 22 nt, Artificial Sequence
  SAMD9 targeting guide sequence portion
uucauauguaacuacgguauac

SEQ ID NO: 12085 - RNA, 22 nt, Artificial Sequence
  SAMD9 targeting guide sequence portion
uucuauguauaccguaguuaca

SEQ ID NO: 12086 - RNA, 22 nt, Artificial Sequence
  SAMD9 targeting guide sequence portion
uugcuuauucacuuucuaugua

SEQ ID NO: 12087 - RNA, 22 nt, Artificial Sequence
  SAMD9 targeting guide sequence portion
uuucauauguaacuacgguaua

SEQ ID NO: 12088 - RNA, 22 nt, Artificial Sequence
  SAMD9 targeting guide sequence portion
uuucuauguauaccguaguuac

SEQ ID NO: 12089 - RNA, 22 nt, Artificial Sequence
  SAMD9 targeting guide sequence portion
uuuucauauguaacuacgguau

SEQ ID NO: 12090 - RNA, 22 nt, Artificial Sequence
  SAMD9 targeting guide sequence portion
uuuuucauauguaacuacggua

SEQ ID NO: 12091 - RNA, 22 nt, Artificial Sequence
  SAMD9 targeting guide sequence portion
uuuuuucauauguaacuacggu

SEQ ID NO: 12092 - RNA, 20 nt, Artificial Sequence
  SAMD9 targeting guide sequence portion
aacuaugguauacauagaaa

SEQ ID NO: 12093 - RNA, 20 nt, Artificial Sequence
  SAMD9 targeting guide sequence portion
accauaguuacauaugaaaa

SEQ ID NO: 12094 - RNA, 20 nt, Artificial Sequence
  SAMD9 targeting guide sequence portion
acuaugguauacauagaaag

SEQ ID NO: 12095 - RNA, 20 nt, Artificial Sequence
  SAMD9 targeting guide sequence portion
acuuucuauguauaccauag

SEQ ID NO: 12096 - RNA, 20 nt, Artificial Sequence
  SAMD9 targeting guide sequence portion
auaccauaguuacauaugaa

SEQ ID NO: 12097 - RNA, 20 nt, Artificial Sequence
  SAMD9 targeting guide sequence portion
auauguaacuaugguauaca

SEQ ID NO: 12098 - RNA, 20 nt, Artificial Sequence
  SAMD9 targeting guide sequence portion
augguauacauagaaaguga

SEQ ID NO: 12099 - RNA, 20 nt, Artificial Sequence
  SAMD9 targeting guide sequence portion
auguaacuaugguauacaua

SEQ ID NO: 12100 - RNA, 20 nt, Artificial Sequence
  SAMD9 targeting guide sequence portion
auguauaccauaguuacaua

SEQ ID NO: 12101 - RNA, 20 nt, Artificial Sequence
  SAMD9 targeting guide sequence portion
cacuuucuauguauaccaua

SEQ ID NO: 12102 - RNA, 20 nt, Artificial Sequence
  SAMD9 targeting guide sequence portion
cauaguuacauaugaaaaaa

SEQ ID NO: 12103 - RNA, 20 nt, Artificial Sequence
  SAMD9 targeting guide sequence portion
cauauguaacuaugguauac

SEQ ID NO: 12104 - RNA, 20 nt, Artificial Sequence
  SAMD9 targeting guide sequence portion
ccauaguuacauaugaaaaa

SEQ ID NO: 12105 - RNA, 20 nt, Artificial Sequence
  SAMD9 targeting guide sequence portion
cuaugguauacauagaaagu

SEQ ID NO: 12106 - RNA, 20 nt, Artificial Sequence
  SAMD9 targeting guide sequence portion
cuauguauaccauaguuaca

SEQ ID NO: 12107 - RNA, 20 nt, Artificial Sequence
  SAMD9 targeting guide sequence portion
cuuucuauguauaccauagu

SEQ ID NO: 12108 - RNA, 20 nt, Artificial Sequence
  SAMD9 targeting guide sequence portion
guaacuaugguauacauaga

SEQ ID NO: 12109 - RNA, 20 nt, Artificial Sequence
  SAMD9 targeting guide sequence portion
guauaccauaguuacauaug

SEQ ID NO: 12110 - RNA, 20 nt, Artificial Sequence
  SAMD9 targeting guide sequence portion
uaacuaugguauacauagaa

SEQ ID NO: 12111 - RNA, 20 nt, Artificial Sequence
  SAMD9 targeting guide sequence portion
uaccauaguuacauaugaaa

SEQ ID NO: 12112 - RNA, 20 nt, Artificial Sequence
  SAMD9 targeting guide sequence portion
uauaccauaguuacauauga

SEQ ID NO: 12113 - RNA, 20 nt, Artificial Sequence
  SAMD9 targeting guide sequence portion
uaugguauacauagaaagug

SEQ ID NO: 12114 - RNA, 20 nt, Artificial Sequence
  SAMD9 targeting guide sequence portion
uauguaacuaugguauacau

SEQ ID NO: 12115 - RNA, 20 nt, Artificial Sequence
  SAMD9 targeting guide sequence portion
uauguauaccauaguuacau

SEQ ID NO: 12116 - RNA, 20 nt, Artificial Sequence
  SAMD9 targeting guide sequence portion
ucacuuucuauguauaccau

SEQ ID NO: 12117 - RNA, 20 nt, Artificial Sequence
  SAMD9 targeting guide sequence portion
ucauauguaacuaugguaua

SEQ ID NO: 12118 - RNA, 20 nt, Artificial Sequence
  SAMD9 targeting guide sequence portion
ucuauguauaccauaguuac

SEQ ID NO: 12119 - RNA, 20 nt, Artificial Sequence
  SAMD9 targeting guide sequence portion
ugguauacauagaaagugaa

SEQ ID NO: 12120 - RNA, 20 nt, Artificial Sequence
  SAMD9 targeting guide sequence portion
uguaacuaugguauacauag

SEQ ID NO: 12121 - RNA, 20 nt, Artificial Sequence
  SAMD9 targeting guide sequence portion
uguauaccauaguuacauau

SEQ ID NO: 12122 - RNA, 20 nt, Artificial Sequence
  SAMD9 targeting guide sequence portion
uucacuuucuauguauacca

SEQ ID NO: 12123 - RNA, 20 nt, Artificial Sequence
  SAMD9 targeting guide sequence portion
uucauauguaacuaugguau

SEQ ID NO: 12124 - RNA, 20 nt, Artificial Sequence
  SAMD9 targeting guide sequence portion
uucuauguauaccauaguua

SEQ ID NO: 12125 - RNA, 20 nt, Artificial Sequence
  SAMD9 targeting guide sequence portion
uuucauauguaacuauggua

SEQ ID NO: 12126 - RNA, 20 nt, Artificial Sequence
  SAMD9 targeting guide sequence portion
uuucuauguauaccauaguu

SEQ ID NO: 12127 - RNA, 20 nt, Artificial Sequence
  SAMD9 targeting guide sequence portion
uuuucauauguaacuauggu

SEQ ID NO: 12128 - RNA, 20 nt, Artificial Sequence
  SAMD9 targeting guide sequence portion
uuuuucauauguaacuaugg

SEQ ID NO: 12129 - RNA, 20 nt, Artificial Sequence
  SAMD9 targeting guide sequence portion
uuuuuucauauguaacuaug

SEQ ID NO: 12130 - RNA, 21 nt, Artificial Sequence
  SAMD9 targeting guide sequence portion
aacuaugguauacauagaaag

SEQ ID NO: 12131 - RNA, 21 nt, Artificial Sequence
  SAMD9 targeting guide sequence portion
accauaguuacauaugaaaaa

SEQ ID NO: 12132 - RNA, 21 nt, Artificial Sequence
  SAMD9 targeting guide sequence portion
acuaugguauacauagaaagu

SEQ ID NO: 12133 - RNA, 21 nt, Artificial Sequence
  SAMD9 targeting guide sequence portion
acuuucuauguauaccauagu

SEQ ID NO: 12134 - RNA, 21 nt, Artificial Sequence
  SAMD9 targeting guide sequence portion
auaccauaguuacauaugaaa

SEQ ID NO: 12135 - RNA, 21 nt, Artificial Sequence
  SAMD9 targeting guide sequence portion
auauguaacuaugguauacau

SEQ ID NO: 12136 - RNA, 21 nt, Artificial Sequence
  SAMD9 targeting guide sequence portion
augguauacauagaaagugaa

SEQ ID NO: 12137 - RNA, 21 nt, Artificial Sequence
  SAMD9 targeting guide sequence portion
auguaacuaugguauacauag

SEQ ID NO: 12138 - RNA, 21 nt, Artificial Sequence
  SAMD9 targeting guide sequence portion
auguauaccauaguuacauau

SEQ ID NO: 12139 - RNA, 21 nt, Artificial Sequence
  SAMD9 targeting guide sequence portion
auucacuuucuauguauacca

SEQ ID NO: 12140 - RNA, 21 nt, Artificial Sequence
  SAMD9 targeting guide sequence portion
cacuuucuauguauaccauag

SEQ ID NO: 12141 - RNA, 21 nt, Artificial Sequence
  SAMD9 targeting guide sequence portion
cauauguaacuaugguauaca

SEQ ID NO: 12142 - RNA, 21 nt, Artificial Sequence
  SAMD9 targeting guide sequence portion
ccauaguuacauaugaaaaaa

SEQ ID NO: 12143 - RNA, 21 nt, Artificial Sequence
  SAMD9 targeting guide sequence portion
cuaugguauacauagaaagug

SEQ ID NO: 12144 - RNA, 21 nt, Artificial Sequence
  SAMD9 targeting guide sequence portion
cuauguauaccauaguuacau

SEQ ID NO: 12145 - RNA, 21 nt, Artificial Sequence
  SAMD9 targeting guide sequence portion
cuuucuauguauaccauaguu

SEQ ID NO: 12146 - RNA, 21 nt, Artificial Sequence
  SAMD9 targeting guide sequence portion
guaacuaugguauacauagaa

SEQ ID NO: 12147 - RNA, 21 nt, Artificial Sequence
  SAMD9 targeting guide sequence portion
guauaccauaguuacauauga

SEQ ID NO: 12148 - RNA, 21 nt, Artificial Sequence
  SAMD9 targeting guide sequence portion
uaacuaugguauacauagaaa

SEQ ID NO: 12149 - RNA, 21 nt, Artificial Sequence
  SAMD9 targeting guide sequence portion
uaccauaguuacauaugaaaa

SEQ ID NO: 12150 - RNA, 21 nt, Artificial Sequence
  SAMD9 targeting guide sequence portion
uauaccauaguuacauaugaa

SEQ ID NO: 12151 - RNA, 21 nt, Artificial Sequence
  SAMD9 targeting guide sequence portion
uaugguauacauagaaaguga

SEQ ID NO: 12152 - RNA, 21 nt, Artificial Sequence
  SAMD9 targeting guide sequence portion
uauguaacuaugguauacaua

SEQ ID NO: 12153 - RNA, 21 nt, Artificial Sequence
  SAMD9 targeting guide sequence portion
uauguauaccauaguuacaua

SEQ ID NO: 12154 - RNA, 21 nt, Artificial Sequence
  SAMD9 targeting guide sequence portion
ucacuuucuauguauaccaua

SEQ ID NO: 12155 - RNA, 21 nt, Artificial Sequence
  SAMD9 targeting guide sequence portion
ucauauguaacuaugguauac

SEQ ID NO: 12156 - RNA, 21 nt, Artificial Sequence
  SAMD9 targeting guide sequence portion
ucuauguauaccauaguuaca

SEQ ID NO: 12157 - RNA, 21 nt, Artificial Sequence
  SAMD9 targeting guide sequence portion
ugguauacauagaaagugaau

SEQ ID NO: 12158 - RNA, 21 nt, Artificial Sequence
  SAMD9 targeting guide sequence portion
uguaacuaugguauacauaga

SEQ ID NO: 12159 - RNA, 21 nt, Artificial Sequence
  SAMD9 targeting guide sequence portion
uguauaccauaguuacauaug

SEQ ID NO: 12160 - RNA, 21 nt, Artificial Sequence
  SAMD9 targeting guide sequence portion
uucacuuucuauguauaccau

SEQ ID NO: 12161 - RNA, 21 nt, Artificial Sequence
  SAMD9 targeting guide sequence portion
uucauauguaacuaugguaua

SEQ ID NO: 12162 - RNA, 21 nt, Artificial Sequence
  SAMD9 targeting guide sequence portion
uucuauguauaccauaguuac

SEQ ID NO: 12163 - RNA, 21 nt, Artificial Sequence
  SAMD9 targeting guide sequence portion
uuucauauguaacuaugguau

SEQ ID NO: 12164 - RNA, 21 nt, Artificial Sequence
  SAMD9 targeting guide sequence portion
uuucuauguauaccauaguua

SEQ ID NO: 12165 - RNA, 21 nt, Artificial Sequence
  SAMD9 targeting guide sequence portion
uuuucauauguaacuauggua

SEQ ID NO: 12166 - RNA, 21 nt, Artificial Sequence
  SAMD9 targeting guide sequence portion
uuuuucauauguaacuauggu

SEQ ID NO: 12167 - RNA, 21 nt, Artificial Sequence
  SAMD9 targeting guide sequence portion
uuuuuucauauguaacuaugg

SEQ ID NO: 12168 - RNA, 22 nt, Artificial Sequence
  SAMD9 targeting guide sequence portion
aacuaugguauacauagaaagu

SEQ ID NO: 12169 - RNA, 22 nt, Artificial Sequence
  SAMD9 targeting guide sequence portion
accauaguuacauaugaaaaaa

SEQ ID NO: 12170 - RNA, 22 nt, Artificial Sequence
  SAMD9 targeting guide sequence portion
acuaugguauacauagaaagug

SEQ ID NO: 12171 - RNA, 22 nt, Artificial Sequence
  SAMD9 targeting guide sequence portion
acuuucuauguauaccauaguu

SEQ ID NO: 12172 - RNA, 22 nt, Artificial Sequence
  SAMD9 targeting guide sequence portion
auaccauaguuacauaugaaaa

SEQ ID NO: 12173 - RNA, 22 nt, Artificial Sequence
  SAMD9 targeting guide sequence portion
auauguaacuaugguauacaua

SEQ ID NO: 12174 - RNA, 22 nt, Artificial Sequence
  SAMD9 targeting guide sequence portion
augguauacauagaaagugaau

SEQ ID NO: 12175 - RNA, 22 nt, Artificial Sequence
  SAMD9 targeting guide sequence portion
auguaacuaugguauacauaga

SEQ ID NO: 12176 - RNA, 22 nt, Artificial Sequence
  SAMD9 targeting guide sequence portion
auguauaccauaguuacauaug

SEQ ID NO: 12177 - RNA, 22 nt, Artificial Sequence
  SAMD9 targeting guide sequence portion
auucacuuucuauguauaccau

SEQ ID NO: 12178 - RNA, 22 nt, Artificial Sequence
  SAMD9 targeting guide sequence portion
cacuuucuauguauaccauagu

SEQ ID NO: 12179 - RNA, 22 nt, Artificial Sequence
  SAMD9 targeting guide sequence portion
cauauguaacuaugguauacau

SEQ ID NO: 12180 - RNA, 22 nt, Artificial Sequence
  SAMD9 targeting guide sequence portion
cuaugguauacauagaaaguga

SEQ ID NO: 12181 - RNA, 22 nt, Artificial Sequence
  SAMD9 targeting guide sequence portion
cuauguauaccauaguuacaua

SEQ ID NO: 12182 - RNA, 22 nt, Artificial Sequence
  SAMD9 targeting guide sequence portion
cuuucuauguauaccauaguua

SEQ ID NO: 12183 - RNA, 22 nt, Artificial Sequence
  SAMD9 targeting guide sequence portion
guaacuaugguauacauagaaa

SEQ ID NO: 12184 - RNA, 22 nt, Artificial Sequence
  SAMD9 targeting guide sequence portion
guauaccauaguuacauaugaa

SEQ ID NO: 12185 - RNA, 22 nt, Artificial Sequence
  SAMD9 targeting guide sequence portion
uaacuaugguauacauagaaag

SEQ ID NO: 12186 - RNA, 22 nt, Artificial Sequence
  SAMD9 targeting guide sequence portion
uaccauaguuacauaugaaaaa

SEQ ID NO: 12187 - RNA, 22 nt, Artificial Sequence
  SAMD9 targeting guide sequence portion
uauaccauaguuacauaugaaa

SEQ ID NO: 12188 - RNA, 22 nt, Artificial Sequence
  SAMD9 targeting guide sequence portion
uaugguauacauagaaagugaa

SEQ ID NO: 12189 - RNA, 22 nt, Artificial Sequence
  SAMD9 targeting guide sequence portion
uauguaacuaugguauacauag

SEQ ID NO: 12190 - RNA, 22 nt, Artificial Sequence
  SAMD9 targeting guide sequence portion
uauguauaccauaguuacauau

SEQ ID NO: 12191 - RNA, 22 nt, Artificial Sequence
  SAMD9 targeting guide sequence portion
uauucacuuucuauguauacca

SEQ ID NO: 12192 - RNA, 22 nt, Artificial Sequence
  SAMD9 targeting guide sequence portion
ucacuuucuauguauaccauag

SEQ ID NO: 12193 - RNA, 22 nt, Artificial Sequence
  SAMD9 targeting guide sequence portion
ucauauguaacuaugguauaca

SEQ ID NO: 12194 - RNA, 22 nt, Artificial Sequence
  SAMD9 targeting guide sequence portion
ucuauguauaccauaguuacau

SEQ ID NO: 12195 - RNA, 22 nt, Artificial Sequence
  SAMD9 targeting guide sequence portion
ugguauacauagaaagugaaua

SEQ ID NO: 12196 - RNA, 22 nt, Artificial Sequence
  SAMD9 targeting guide sequence portion
uguaacuaugguauacauagaa

SEQ ID NO: 12197 - RNA, 22 nt, Artificial Sequence
  SAMD9 targeting guide sequence portion
uguauaccauaguuacauauga

SEQ ID NO: 12198 - RNA, 22 nt, Artificial Sequence
  SAMD9 targeting guide sequence portion
uucacuuucuauguauaccaua

SEQ ID NO: 12199 - RNA, 22 nt, Artificial Sequence
  SAMD9 targeting guide sequence portion
uucauauguaacuaugguauac

SEQ ID NO: 12200 - RNA, 22 nt, Artificial Sequence
  SAMD9 targeting guide sequence portion
uucuauguauaccauaguuaca

SEQ ID NO: 12201 - RNA, 22 nt, Artificial Sequence
  SAMD9 targeting guide sequence portion
uuucauauguaacuaugguaua

SEQ ID NO: 12202 - RNA, 22 nt, Artificial Sequence
  SAMD9 targeting guide sequence portion
uuucuauguauaccauaguuac

SEQ ID NO: 12203 - RNA, 22 nt, Artificial Sequence
  SAMD9 targeting guide sequence portion
uuuucauauguaacuaugguau

SEQ ID NO: 12204 - RNA, 22 nt, Artificial Sequence
  SAMD9 targeting guide sequence portion
uuuuucauauguaacuauggua

SEQ ID NO: 12205 - RNA, 22 nt, Artificial Sequence
  SAMD9 targeting guide sequence portion
uuuuuucauauguaacuauggu

SEQ ID NO: 12206 - RNA, 20 nt, Artificial Sequence
  SAMD9 targeting guide sequence portion
aaaaauggaagaaugggugu

SEQ ID NO: 12207 - RNA, 20 nt, Artificial Sequence
  SAMD9 targeting guide sequence portion
aaaauggaagaaugggugug

SEQ ID NO: 12208 - RNA, 20 nt, Artificial Sequence
  SAMD9 targeting guide sequence portion
aaauggaagaaugggugugg

SEQ ID NO: 12209 - RNA, 20 nt, Artificial Sequence
  SAMD9 targeting guide sequence portion
aagaauggguguggcccgcc

SEQ ID NO: 12210 - RNA, 20 nt, Artificial Sequence
  SAMD9 targeting guide sequence portion
aaggcacggcgggccacacc

SEQ ID NO: 12211 - RNA, 20 nt, Artificial Sequence
  SAMD9 targeting guide sequence portion
aauggaagaauggguguggc

SEQ ID NO: 12212 - RNA, 20 nt, Artificial Sequence
  SAMD9 targeting guide sequence portion
aauggguguggcccgccgug

SEQ ID NO: 12213 - RNA, 20 nt, Artificial Sequence
  SAMD9 targeting guide sequence portion
acggcaaggcacggcgggcc

SEQ ID NO: 12214 - RNA, 20 nt, Artificial Sequence
  SAMD9 targeting guide sequence portion
acggcgggccacacccauuc

SEQ ID NO: 12215 - RNA, 20 nt, Artificial Sequence
  SAMD9 targeting guide sequence portion
agaauggguguggcccgccg

SEQ ID NO: 12216 - RNA, 20 nt, Artificial Sequence
  SAMD9 targeting guide sequence portion
aggcacggcaaggcacggcg

SEQ ID NO: 12217 - RNA, 20 nt, Artificial Sequence
  SAMD9 targeting guide sequence portion
aggcacggcgggccacaccc

SEQ ID NO: 12218 - RNA, 20 nt, Artificial Sequence
  SAMD9 targeting guide sequence portion
auggaagaauggguguggcc

SEQ ID NO: 12219 - RNA, 20 nt, Artificial Sequence
  SAMD9 targeting guide sequence portion
auggcgaggcacggcaaggc

SEQ ID NO: 12220 - RNA, 20 nt, Artificial Sequence
  SAMD9 targeting guide sequence portion
auggguguggcccgccgugc

SEQ ID NO: 12221 - RNA, 20 nt, Artificial Sequence
  SAMD9 targeting guide sequence portion
caaggcacggcgggccacac

SEQ ID NO: 12222 - RNA, 20 nt, Artificial Sequence
  SAMD9 targeting guide sequence portion
cacggcaaggcacggcgggc

SEQ ID NO: 12223 - RNA, 20 nt, Artificial Sequence
  SAMD9 targeting guide sequence portion
cacggcgggccacacccauu

SEQ ID NO: 12224 - RNA, 20 nt, Artificial Sequence
  SAMD9 targeting guide sequence portion
cccgccgugccuugccgugc

SEQ ID NO: 12225 - RNA, 20 nt, Artificial Sequence
  SAMD9 targeting guide sequence portion
ccgccgugccuugccgugcc

SEQ ID NO: 12226 - RNA, 20 nt, Artificial Sequence
  SAMD9 targeting guide sequence portion
cgaggcacggcaaggcacgg

SEQ ID NO: 12227 - RNA, 20 nt, Artificial Sequence
  SAMD9 targeting guide sequence portion
cgccgugccuugccgugccu

SEQ ID NO: 12228 - RNA, 20 nt, Artificial Sequence
  SAMD9 targeting guide sequence portion
cggcaaggcacggcgggcca

SEQ ID NO: 12229 - RNA, 20 nt, Artificial Sequence
  SAMD9 targeting guide sequence portion
cggcgggccacacccauucu

SEQ ID NO: 12230 - RNA, 20 nt, Artificial Sequence
  SAMD9 targeting guide sequence portion
cgggccacacccauucuucc

SEQ ID NO: 12231 - RNA, 20 nt, Artificial Sequence
  SAMD9 targeting guide sequence portion
gaagaauggguguggcccgc

SEQ ID NO: 12232 - RNA, 20 nt, Artificial Sequence
  SAMD9 targeting guide sequence portion
gaauggguguggcccgccgu

SEQ ID NO: 12233 - RNA, 20 nt, Artificial Sequence
  SAMD9 targeting guide sequence portion
gaggcacggcaaggcacggc

SEQ ID NO: 12234 - RNA, 20 nt, Artificial Sequence
  SAMD9 targeting guide sequence portion
gcaaggcacggcgggccaca

SEQ ID NO: 12235 - RNA, 20 nt, Artificial Sequence
  SAMD9 targeting guide sequence portion
gcacggcaaggcacggcggg

SEQ ID NO: 12236 - RNA, 20 nt, Artificial Sequence
  SAMD9 targeting guide sequence portion
gcacggcgggccacacccau

SEQ ID NO: 12237 - RNA, 20 nt, Artificial Sequence
  SAMD9 targeting guide sequence portion
gcccgccgugccuugccgug

SEQ ID NO: 12238 - RNA, 20 nt, Artificial Sequence
  SAMD9 targeting guide sequence portion
gcgaggcacggcaaggcacg

SEQ ID NO: 12239 - RNA, 20 nt, Artificial Sequence
  SAMD9 targeting guide sequence portion
gcgggccacacccauucuuc

SEQ ID NO: 12240 - RNA, 20 nt, Artificial Sequence
  SAMD9 targeting guide sequence portion
ggaagaauggguguggcccg

SEQ ID NO: 12241 - RNA, 20 nt, Artificial Sequence
  SAMD9 targeting guide sequence portion
ggcaaggcacggcgggccac

SEQ ID NO: 12242 - RNA, 20 nt, Artificial Sequence
  SAMD9 targeting guide sequence portion
ggcacggcaaggcacggcgg

SEQ ID NO: 12243 - RNA, 20 nt, Artificial Sequence
  SAMD9 targeting guide sequence portion
ggcacggcgggccacaccca

SEQ ID NO: 12244 - RNA, 20 nt, Artificial Sequence
  SAMD9 targeting guide sequence portion
ggcccgccgugccuugccgu

SEQ ID NO: 12245 - RNA, 20 nt, Artificial Sequence
  SAMD9 targeting guide sequence portion
ggcgaggcacggcaaggcac

SEQ ID NO: 12246 - RNA, 20 nt, Artificial Sequence
  SAMD9 targeting guide sequence portion
ggcgggccacacccauucuu

SEQ ID NO: 12247 - RNA, 20 nt, Artificial Sequence
  SAMD9 targeting guide sequence portion
gggccacacccauucuucca

SEQ ID NO: 12248 - RNA, 20 nt, Artificial Sequence
  SAMD9 targeting guide sequence portion
ggguguggcccgccgugccu

SEQ ID NO: 12249 - RNA, 20 nt, Artificial Sequence
  SAMD9 targeting guide sequence portion
gguguggcccgccgugccuu

SEQ ID NO: 12250 - RNA, 20 nt, Artificial Sequence
  SAMD9 targeting guide sequence portion
guggcccgccgugccuugcc

SEQ ID NO: 12251 - RNA, 20 nt, Artificial Sequence
  SAMD9 targeting guide sequence portion
guguggcccgccgugccuug

SEQ ID NO: 12252 - RNA, 20 nt, Artificial Sequence
  SAMD9 targeting guide sequence portion
uaaaaauggaagaaugggug

SEQ ID NO: 12253 - RNA, 20 nt, Artificial Sequence
  SAMD9 targeting guide sequence portion
uggaagaauggguguggccc

SEQ ID NO: 12254 - RNA, 20 nt, Artificial Sequence
  SAMD9 targeting guide sequence portion
uggcccgccgugccuugccg

SEQ ID NO: 12255 - RNA, 20 nt, Artificial Sequence
  SAMD9 targeting guide sequence portion
uggcgaggcacggcaaggca

SEQ ID NO: 12256 - RNA, 20 nt, Artificial Sequence
  SAMD9 targeting guide sequence portion
uggguguggcccgccgugcc

SEQ ID NO: 12257 - RNA, 20 nt, Artificial Sequence
  SAMD9 targeting guide sequence portion
uguggcccgccgugccuugc

SEQ ID NO: 12258 - RNA, 21 nt, Artificial Sequence
  SAMD9 targeting guide sequence portion
aaaaauggaagaaugggugug

SEQ ID NO: 12259 - RNA, 21 nt, Artificial Sequence
  SAMD9 targeting guide sequence portion
aaaauggaagaaugggugugg

SEQ ID NO: 12260 - RNA, 21 nt, Artificial Sequence
  SAMD9 targeting guide sequence portion
aaauggaagaauggguguggc

SEQ ID NO: 12261 - RNA, 21 nt, Artificial Sequence
  SAMD9 targeting guide sequence portion
aagaauggguguggcccgccg

SEQ ID NO: 12262 - RNA, 21 nt, Artificial Sequence
  SAMD9 targeting guide sequence portion
aaggcacggcgggccacaccc

SEQ ID NO: 12263 - RNA, 21 nt, Artificial Sequence
  SAMD9 targeting guide sequence portion
aauggaagaauggguguggcc

SEQ ID NO: 12264 - RNA, 21 nt, Artificial Sequence
  SAMD9 targeting guide sequence portion
aauggguguggcccgccgugc

SEQ ID NO: 12265 - RNA, 21 nt, Artificial Sequence
  SAMD9 targeting guide sequence portion
acggcaaggcacggcgggcca

SEQ ID NO: 12266 - RNA, 21 nt, Artificial Sequence
  SAMD9 targeting guide sequence portion
acggcgggccacacccauucu

SEQ ID NO: 12267 - RNA, 21 nt, Artificial Sequence
  SAMD9 targeting guide sequence portion
agaauggguguggcccgccgu

SEQ ID NO: 12268 - RNA, 21 nt, Artificial Sequence
  SAMD9 targeting guide sequence portion
aggcacggcaaggcacggcgg

SEQ ID NO: 12269 - RNA, 21 nt, Artificial Sequence
  SAMD9 targeting guide sequence portion
aggcacggcgggccacaccca

SEQ ID NO: 12270 - RNA, 21 nt, Artificial Sequence
  SAMD9 targeting guide sequence portion
auaaaaauggaagaaugggug

SEQ ID NO: 12271 - RNA, 21 nt, Artificial Sequence
  SAMD9 targeting guide sequence portion
auggaagaauggguguggccc

SEQ ID NO: 12272 - RNA, 21 nt, Artificial Sequence
  SAMD9 targeting guide sequence portion
auggcgaggcacggcaaggca

SEQ ID NO: 12273 - RNA, 21 nt, Artificial Sequence
  SAMD9 targeting guide sequence portion
auggguguggcccgccgugcc

SEQ ID NO: 12274 - RNA, 21 nt, Artificial Sequence
  SAMD9 targeting guide sequence portion
caaggcacggcgggccacacc

SEQ ID NO: 12275 - RNA, 21 nt, Artificial Sequence
  SAMD9 targeting guide sequence portion
cacggcaaggcacggcgggcc

SEQ ID NO: 12276 - RNA, 21 nt, Artificial Sequence
  SAMD9 targeting guide sequence portion
cacggcgggccacacccauuc

SEQ ID NO: 12277 - RNA, 21 nt, Artificial Sequence
  SAMD9 targeting guide sequence portion
cauggcgaggcacggcaaggc

SEQ ID NO: 12278 - RNA, 21 nt, Artificial Sequence
  SAMD9 targeting guide sequence portion
cccgccgugccuugccgugcc

SEQ ID NO: 12279 - RNA, 21 nt, Artificial Sequence
  SAMD9 targeting guide sequence portion
ccgccgugccuugccgugccu

SEQ ID NO: 12280 - RNA, 21 nt, Artificial Sequence
  SAMD9 targeting guide sequence portion
cgaggcacggcaaggcacggc

SEQ ID NO: 12281 - RNA, 21 nt, Artificial Sequence
  SAMD9 targeting guide sequence portion
cgccgugccuugccgugccuc

SEQ ID NO: 12282 - RNA, 21 nt, Artificial Sequence
  SAMD9 targeting guide sequence portion
cggcaaggcacggcgggccac

SEQ ID NO: 12283 - RNA, 21 nt, Artificial Sequence
  SAMD9 targeting guide sequence portion
cggcgggccacacccauucuu

SEQ ID NO: 12284 - RNA, 21 nt, Artificial Sequence
  SAMD9 targeting guide sequence portion
cgggccacacccauucuucca

SEQ ID NO: 12285 - RNA, 21 nt, Artificial Sequence
  SAMD9 targeting guide sequence portion
gaagaauggguguggcccgcc

SEQ ID NO: 12286 - RNA, 21 nt, Artificial Sequence
  SAMD9 targeting guide sequence portion
gaauggguguggcccgccgug

SEQ ID NO: 12287 - RNA, 21 nt, Artificial Sequence
  SAMD9 targeting guide sequence portion
gaggcacggcaaggcacggcg

SEQ ID NO: 12288 - RNA, 21 nt, Artificial Sequence
  SAMD9 targeting guide sequence portion
gcaaggcacggcgggccacac

SEQ ID NO: 12289 - RNA, 21 nt, Artificial Sequence
  SAMD9 targeting guide sequence portion
gcacggcaaggcacggcgggc

SEQ ID NO: 12290 - RNA, 21 nt, Artificial Sequence
  SAMD9 targeting guide sequence portion
gcacggcgggccacacccauu

SEQ ID NO: 12291 - RNA, 21 nt, Artificial Sequence
  SAMD9 targeting guide sequence portion
gcccgccgugccuugccgugc

SEQ ID NO: 12292 - RNA, 21 nt, Artificial Sequence
  SAMD9 targeting guide sequence portion
gcgaggcacggcaaggcacgg

SEQ ID NO: 12293 - RNA, 21 nt, Artificial Sequence
  SAMD9 targeting guide sequence portion
gcgggccacacccauucuucc

SEQ ID NO: 12294 - RNA, 21 nt, Artificial Sequence
  SAMD9 targeting guide sequence portion
ggaagaauggguguggcccgc

SEQ ID NO: 12295 - RNA, 21 nt, Artificial Sequence
  SAMD9 targeting guide sequence portion
ggcaaggcacggcgggccaca

SEQ ID NO: 12296 - RNA, 21 nt, Artificial Sequence
  SAMD9 targeting guide sequence portion
ggcacggcaaggcacggcggg

SEQ ID NO: 12297 - RNA, 21 nt, Artificial Sequence
  SAMD9 targeting guide sequence portion
ggcacggcgggccacacccau

SEQ ID NO: 12298 - RNA, 21 nt, Artificial Sequence
  SAMD9 targeting guide sequence portion
ggcccgccgugccuugccgug

SEQ ID NO: 12299 - RNA, 21 nt, Artificial Sequence
  SAMD9 targeting guide sequence portion
ggcgaggcacggcaaggcacg

SEQ ID NO: 12300 - RNA, 21 nt, Artificial Sequence
  SAMD9 targeting guide sequence portion
ggcgggccacacccauucuuc

SEQ ID NO: 12301 - RNA, 21 nt, Artificial Sequence
  SAMD9 targeting guide sequence portion
gggccacacccauucuuccau

SEQ ID NO: 12302 - RNA, 21 nt, Artificial Sequence
  SAMD9 targeting guide sequence portion
ggguguggcccgccgugccuu

SEQ ID NO: 12303 - RNA, 21 nt, Artificial Sequence
  SAMD9 targeting guide sequence portion
gguguggcccgccgugccuug

SEQ ID NO: 12304 - RNA, 21 nt, Artificial Sequence
  SAMD9 targeting guide sequence portion
guggcccgccgugccuugccg

SEQ ID NO: 12305 - RNA, 21 nt, Artificial Sequence
  SAMD9 targeting guide sequence portion
guguggcccgccgugccuugc

SEQ ID NO: 12306 - RNA, 21 nt, Artificial Sequence
  SAMD9 targeting guide sequence portion
uaaaaauggaagaaugggugu

SEQ ID NO: 12307 - RNA, 21 nt, Artificial Sequence
  SAMD9 targeting guide sequence portion
uggaagaauggguguggcccg

SEQ ID NO: 12308 - RNA, 21 nt, Artificial Sequence
  SAMD9 targeting guide sequence portion
uggcccgccgugccuugccgu

SEQ ID NO: 12309 - RNA, 21 nt, Artificial Sequence
  SAMD9 targeting guide sequence portion
uggcgaggcacggcaaggcac

SEQ ID NO: 12310 - RNA, 21 nt, Artificial Sequence
  SAMD9 targeting guide sequence portion
uggguguggcccgccgugccu

SEQ ID NO: 12311 - RNA, 21 nt, Artificial Sequence
  SAMD9 targeting guide sequence portion
uguggcccgccgugccuugcc

SEQ ID NO: 12312 - RNA, 22 nt, Artificial Sequence
  SAMD9 targeting guide sequence portion
aaaaauggaagaaugggugugg

SEQ ID NO: 12313 - RNA, 22 nt, Artificial Sequence
  SAMD9 targeting guide sequence portion
aaaauggaagaauggguguggc

SEQ ID NO: 12314 - RNA, 22 nt, Artificial Sequence
  SAMD9 targeting guide sequence portion
aaauggaagaauggguguggcc

SEQ ID NO: 12315 - RNA, 22 nt, Artificial Sequence
  SAMD9 targeting guide sequence portion
aagaauggguguggcccgccgu

SEQ ID NO: 12316 - RNA, 22 nt, Artificial Sequence
  SAMD9 targeting guide sequence portion
aaggcacggcgggccacaccca

SEQ ID NO: 12317 - RNA, 22 nt, Artificial Sequence
  SAMD9 targeting guide sequence portion
aauggaagaauggguguggccc

SEQ ID NO: 12318 - RNA, 22 nt, Artificial Sequence
  SAMD9 targeting guide sequence portion
aauggguguggcccgccgugcc

SEQ ID NO: 12319 - RNA, 22 nt, Artificial Sequence
  SAMD9 targeting guide sequence portion
acggcaaggcacggcgggccac

SEQ ID NO: 12320 - RNA, 22 nt, Artificial Sequence
  SAMD9 targeting guide sequence portion
acggcgggccacacccauucuu

SEQ ID NO: 12321 - RNA, 22 nt, Artificial Sequence
  SAMD9 targeting guide sequence portion
agaauggguguggcccgccgug

SEQ ID NO: 12322 - RNA, 22 nt, Artificial Sequence
  SAMD9 targeting guide sequence portion
aggcacggcaaggcacggcggg

SEQ ID NO: 12323 - RNA, 22 nt, Artificial Sequence
  SAMD9 targeting guide sequence portion
aggcacggcgggccacacccau

SEQ ID NO: 12324 - RNA, 22 nt, Artificial Sequence
  SAMD9 targeting guide sequence portion
auaaaaauggaagaaugggugu

SEQ ID NO: 12325 - RNA, 22 nt, Artificial Sequence
  SAMD9 targeting guide sequence portion
auggaagaauggguguggcccg

SEQ ID NO: 12326 - RNA, 22 nt, Artificial Sequence
  SAMD9 targeting guide sequence portion
auggcgaggcacggcaaggcac

SEQ ID NO: 12327 - RNA, 22 nt, Artificial Sequence
  SAMD9 targeting guide sequence portion
auggguguggcccgccgugccu

SEQ ID NO: 12328 - RNA, 22 nt, Artificial Sequence
  SAMD9 targeting guide sequence portion
caaggcacggcgggccacaccc

SEQ ID NO: 12329 - RNA, 22 nt, Artificial Sequence
  SAMD9 targeting guide sequence portion
cacggcaaggcacggcgggcca

SEQ ID NO: 12330 - RNA, 22 nt, Artificial Sequence
  SAMD9 targeting guide sequence portion
cacggcgggccacacccauucu

SEQ ID NO: 12331 - RNA, 22 nt, Artificial Sequence
  SAMD9 targeting guide sequence portion
cauggcgaggcacggcaaggca

SEQ ID NO: 12332 - RNA, 22 nt, Artificial Sequence
  SAMD9 targeting guide sequence portion
cccgccgugccuugccgugccu

SEQ ID NO: 12333 - RNA, 22 nt, Artificial Sequence
  SAMD9 targeting guide sequence portion
ccgccgugccuugccgugccuc

SEQ ID NO: 12334 - RNA, 22 nt, Artificial Sequence
  SAMD9 targeting guide sequence portion
cgaggcacggcaaggcacggcg

SEQ ID NO: 12335 - RNA, 22 nt, Artificial Sequence
  SAMD9 targeting guide sequence portion
cgccgugccuugccgugccucg

SEQ ID NO: 12336 - RNA, 22 nt, Artificial Sequence
  SAMD9 targeting guide sequence portion
cggcaaggcacggcgggccaca

SEQ ID NO: 12337 - RNA, 22 nt, Artificial Sequence
  SAMD9 targeting guide sequence portion
cggcgggccacacccauucuuc

SEQ ID NO: 12338 - RNA, 22 nt, Artificial Sequence
  SAMD9 targeting guide sequence portion
cgggccacacccauucuuccau

SEQ ID NO: 12339 - RNA, 22 nt, Artificial Sequence
  SAMD9 targeting guide sequence portion
gaagaauggguguggcccgccg

SEQ ID NO: 12340 - RNA, 22 nt, Artificial Sequence
  SAMD9 targeting guide sequence portion
gaauggguguggcccgccgugc

SEQ ID NO: 12341 - RNA, 22 nt, Artificial Sequence
  SAMD9 targeting guide sequence portion
gaggcacggcaaggcacggcgg

SEQ ID NO: 12342 - RNA, 22 nt, Artificial Sequence
  SAMD9 targeting guide sequence portion
gcaaggcacggcgggccacacc

SEQ ID NO: 12343 - RNA, 22 nt, Artificial Sequence
  SAMD9 targeting guide sequence portion
gcacggcaaggcacggcgggcc

SEQ ID NO: 12344 - RNA, 22 nt, Artificial Sequence
  SAMD9 targeting guide sequence portion
gcacggcgggccacacccauuc

SEQ ID NO: 12345 - RNA, 22 nt, Artificial Sequence
  SAMD9 targeting guide sequence portion
gcauggcgaggcacggcaaggc

SEQ ID NO: 12346 - RNA, 22 nt, Artificial Sequence
  SAMD9 targeting guide sequence portion
gcccgccgugccuugccgugcc

SEQ ID NO: 12347 - RNA, 22 nt, Artificial Sequence
  SAMD9 targeting guide sequence portion
gcgaggcacggcaaggcacggc

SEQ ID NO: 12348 - RNA, 22 nt, Artificial Sequence
  SAMD9 targeting guide sequence portion
gcgggccacacccauucuucca

SEQ ID NO: 12349 - RNA, 22 nt, Artificial Sequence
  SAMD9 targeting guide sequence portion
ggaagaauggguguggcccgcc

SEQ ID NO: 12350 - RNA, 22 nt, Artificial Sequence
  SAMD9 targeting guide sequence portion
ggcaaggcacggcgggccacac

SEQ ID NO: 12351 - RNA, 22 nt, Artificial Sequence
  SAMD9 targeting guide sequence portion
ggcacggcaaggcacggcgggc

SEQ ID NO: 12352 - RNA, 22 nt, Artificial Sequence
  SAMD9 targeting guide sequence portion
ggcacggcgggccacacccauu

SEQ ID NO: 12353 - RNA, 22 nt, Artificial Sequence
  SAMD9 targeting guide sequence portion
ggcccgccgugccuugccgugc

SEQ ID NO: 12354 - RNA, 22 nt, Artificial Sequence
  SAMD9 targeting guide sequence portion
ggcgaggcacggcaaggcacgg

SEQ ID NO: 12355 - RNA, 22 nt, Artificial Sequence
  SAMD9 targeting guide sequence portion
ggcgggccacacccauucuucc

SEQ ID NO: 12356 - RNA, 22 nt, Artificial Sequence
  SAMD9 targeting guide sequence portion
gggccacacccauucuuccauu

SEQ ID NO: 12357 - RNA, 22 nt, Artificial Sequence
  SAMD9 targeting guide sequence portion
ggguguggcccgccgugccuug

SEQ ID NO: 12358 - RNA, 22 nt, Artificial Sequence
  SAMD9 targeting guide sequence portion
gguguggcccgccgugccuugc

SEQ ID NO: 12359 - RNA, 22 nt, Artificial Sequence
  SAMD9 targeting guide sequence portion
guggcccgccgugccuugccgu

SEQ ID NO: 12360 - RNA, 22 nt, Artificial Sequence
  SAMD9 targeting guide sequence portion
guguggcccgccgugccuugcc

SEQ ID NO: 12361 - RNA, 22 nt, Artificial Sequence
  SAMD9 targeting guide sequence portion
uaaaaauggaagaaugggugug

SEQ ID NO: 12362 - RNA, 22 nt, Artificial Sequence
  SAMD9 targeting guide sequence portion
uauaaaaauggaagaaugggug

SEQ ID NO: 12363 - RNA, 22 nt, Artificial Sequence
  SAMD9 targeting guide sequence portion
uggaagaauggguguggcccgc

SEQ ID NO: 12364 - RNA, 22 nt, Artificial Sequence
  SAMD9 targeting guide sequence portion
uggcccgccgugccuugccgug

SEQ ID NO: 12365 - RNA, 22 nt, Artificial Sequence
  SAMD9 targeting guide sequence portion
uggcgaggcacggcaaggcacg

SEQ ID NO: 12366 - RNA, 22 nt, Artificial Sequence
  SAMD9 targeting guide sequence portion
uggguguggcccgccgugccuu

SEQ ID NO: 12367 - RNA, 22 nt, Artificial Sequence
  SAMD9 targeting guide sequence portion
uguggcccgccgugccuugccg

SEQ ID NO: 12368 - RNA, 20 nt, Artificial Sequence
  SAMD9 targeting guide sequence portion
aagaauggguguggccugcc

SEQ ID NO: 12369 - RNA, 20 nt, Artificial Sequence
  SAMD9 targeting guide sequence portion
aaggcacggcaggccacacc

SEQ ID NO: 12370 - RNA, 20 nt, Artificial Sequence
  SAMD9 targeting guide sequence portion
aauggguguggccugccgug

SEQ ID NO: 12371 - RNA, 20 nt, Artificial Sequence
  SAMD9 targeting guide sequence portion
acggcaaggcacggcaggcc

SEQ ID NO: 12372 - RNA, 20 nt, Artificial Sequence
  SAMD9 targeting guide sequence portion
acggcaggccacacccauuc

SEQ ID NO: 12373 - RNA, 20 nt, Artificial Sequence
  SAMD9 targeting guide sequence portion
agaauggguguggccugccg

SEQ ID NO: 12374 - RNA, 20 nt, Artificial Sequence
  SAMD9 targeting guide sequence portion
aggcacggcaaggcacggca

SEQ ID NO: 12375 - RNA, 20 nt, Artificial Sequence
  SAMD9 targeting guide sequence portion
aggcacggcaggccacaccc

SEQ ID NO: 12376 - RNA, 20 nt, Artificial Sequence
  SAMD9 targeting guide sequence portion
aggccacacccauucuucca

SEQ ID NO: 12377 - RNA, 20 nt, Artificial Sequence
  SAMD9 targeting guide sequence portion
auggguguggccugccgugc

SEQ ID NO: 12378 - RNA, 20 nt, Artificial Sequence
  SAMD9 targeting guide sequence portion
caaggcacggcaggccacac

SEQ ID NO: 12379 - RNA, 20 nt, Artificial Sequence
  SAMD9 targeting guide sequence portion
cacggcaaggcacggcaggc

SEQ ID NO: 12380 - RNA, 20 nt, Artificial Sequence
  SAMD9 targeting guide sequence portion
cacggcaggccacacccauu

SEQ ID NO: 12381 - RNA, 20 nt, Artificial Sequence
  SAMD9 targeting guide sequence portion
caggccacacccauucuucc

SEQ ID NO: 12382 - RNA, 20 nt, Artificial Sequence
  SAMD9 targeting guide sequence portion
ccugccgugccuugccgugc

SEQ ID NO: 12383 - RNA, 20 nt, Artificial Sequence
  SAMD9 targeting guide sequence portion
cggcaaggcacggcaggcca

SEQ ID NO: 12384 - RNA, 20 nt, Artificial Sequence
  SAMD9 targeting guide sequence portion
cggcaggccacacccauucu

SEQ ID NO: 12385 - RNA, 20 nt, Artificial Sequence
  SAMD9 targeting guide sequence portion
cugccgugccuugccgugcc

SEQ ID NO: 12386 - RNA, 20 nt, Artificial Sequence
  SAMD9 targeting guide sequence portion
gaagaauggguguggccugc

SEQ ID NO: 12387 - RNA, 20 nt, Artificial Sequence
  SAMD9 targeting guide sequence portion
gaauggguguggccugccgu

SEQ ID NO: 12388 - RNA, 20 nt, Artificial Sequence
  SAMD9 targeting guide sequence portion
gcaaggcacggcaggccaca

SEQ ID NO: 12389 - RNA, 20 nt, Artificial Sequence
  SAMD9 targeting guide sequence portion
gcacggcaaggcacggcagg

SEQ ID NO: 12390 - RNA, 20 nt, Artificial Sequence
  SAMD9 targeting guide sequence portion
gcacggcaggccacacccau

SEQ ID NO: 12391 - RNA, 20 nt, Artificial Sequence
  SAMD9 targeting guide sequence portion
gcaggccacacccauucuuc

SEQ ID NO: 12392 - RNA, 20 nt, Artificial Sequence
  SAMD9 targeting guide sequence portion
gccugccgugccuugccgug

SEQ ID NO: 12393 - RNA, 20 nt, Artificial Sequence
  SAMD9 targeting guide sequence portion
ggaagaauggguguggccug

SEQ ID NO: 12394 - RNA, 20 nt, Artificial Sequence
  SAMD9 targeting guide sequence portion
ggcaaggcacggcaggccac

SEQ ID NO: 12395 - RNA, 20 nt, Artificial Sequence
  SAMD9 targeting guide sequence portion
ggcacggcaaggcacggcag

SEQ ID NO: 12396 - RNA, 20 nt, Artificial Sequence
  SAMD9 targeting guide sequence portion
ggcacggcaggccacaccca

SEQ ID NO: 12397 - RNA, 20 nt, Artificial Sequence
  SAMD9 targeting guide sequence portion
ggcaggccacacccauucuu

SEQ ID NO: 12398 - RNA, 20 nt, Artificial Sequence
  SAMD9 targeting guide sequence portion
ggccugccgugccuugccgu

SEQ ID NO: 12399 - RNA, 20 nt, Artificial Sequence
  SAMD9 targeting guide sequence portion
ggguguggccugccgugccu

SEQ ID NO: 12400 - RNA, 20 nt, Artificial Sequence
  SAMD9 targeting guide sequence portion
gguguggccugccgugccuu

SEQ ID NO: 12401 - RNA, 20 nt, Artificial Sequence
  SAMD9 targeting guide sequence portion
guggccugccgugccuugcc

SEQ ID NO: 12402 - RNA, 20 nt, Artificial Sequence
  SAMD9 targeting guide sequence portion
guguggccugccgugccuug

SEQ ID NO: 12403 - RNA, 20 nt, Artificial Sequence
  SAMD9 targeting guide sequence portion
ugccgugccuugccgugccu

SEQ ID NO: 12404 - RNA, 20 nt, Artificial Sequence
  SAMD9 targeting guide sequence portion
uggaagaauggguguggccu

SEQ ID NO: 12405 - RNA, 20 nt, Artificial Sequence
  SAMD9 targeting guide sequence portion
uggccugccgugccuugccg

SEQ ID NO: 12406 - RNA, 20 nt, Artificial Sequence
  SAMD9 targeting guide sequence portion
uggguguggccugccgugcc

SEQ ID NO: 12407 - RNA, 20 nt, Artificial Sequence
  SAMD9 targeting guide sequence portion
uguggccugccgugccuugc

SEQ ID NO: 12408 - RNA, 21 nt, Artificial Sequence
  SAMD9 targeting guide sequence portion
aagaauggguguggccugccg

SEQ ID NO: 12409 - RNA, 21 nt, Artificial Sequence
  SAMD9 targeting guide sequence portion
aaggcacggcaggccacaccc

SEQ ID NO: 12410 - RNA, 21 nt, Artificial Sequence
  SAMD9 targeting guide sequence portion
aauggguguggccugccgugc

SEQ ID NO: 12411 - RNA, 21 nt, Artificial Sequence
  SAMD9 targeting guide sequence portion
acggcaaggcacggcaggcca

SEQ ID NO: 12412 - RNA, 21 nt, Artificial Sequence
  SAMD9 targeting guide sequence portion
acggcaggccacacccauucu

SEQ ID NO: 12413 - RNA, 21 nt, Artificial Sequence
  SAMD9 targeting guide sequence portion
agaauggguguggccugccgu

SEQ ID NO: 12414 - RNA, 21 nt, Artificial Sequence
  SAMD9 targeting guide sequence portion
aggcacggcaaggcacggcag

SEQ ID NO: 12415 - RNA, 21 nt, Artificial Sequence
  SAMD9 targeting guide sequence portion
aggcacggcaggccacaccca

SEQ ID NO: 12416 - RNA, 21 nt, Artificial Sequence
  SAMD9 targeting guide sequence portion
aggccacacccauucuuccau

SEQ ID NO: 12417 - RNA, 21 nt, Artificial Sequence
  SAMD9 targeting guide sequence portion
auggaagaauggguguggccu

SEQ ID NO: 12418 - RNA, 21 nt, Artificial Sequence
  SAMD9 targeting guide sequence portion
auggguguggccugccgugcc

SEQ ID NO: 12419 - RNA, 21 nt, Artificial Sequence
  SAMD9 targeting guide sequence portion
caaggcacggcaggccacacc

SEQ ID NO: 12420 - RNA, 21 nt, Artificial Sequence
  SAMD9 targeting guide sequence portion
cacggcaaggcacggcaggcc

SEQ ID NO: 12421 - RNA, 21 nt, Artificial Sequence
  SAMD9 targeting guide sequence portion
cacggcaggccacacccauuc

SEQ ID NO: 12422 - RNA, 21 nt, Artificial Sequence
  SAMD9 targeting guide sequence portion
caggccacacccauucuucca

SEQ ID NO: 12423 - RNA, 21 nt, Artificial Sequence
  SAMD9 targeting guide sequence portion
ccugccgugccuugccgugcc

SEQ ID NO: 12424 - RNA, 21 nt, Artificial Sequence
  SAMD9 targeting guide sequence portion
cggcaaggcacggcaggccac

SEQ ID NO: 12425 - RNA, 21 nt, Artificial Sequence
  SAMD9 targeting guide sequence portion
cggcaggccacacccauucuu

SEQ ID NO: 12426 - RNA, 21 nt, Artificial Sequence
  SAMD9 targeting guide sequence portion
cugccgugccuugccgugccu

SEQ ID NO: 12427 - RNA, 21 nt, Artificial Sequence
  SAMD9 targeting guide sequence portion
gaagaauggguguggccugcc

SEQ ID NO: 12428 - RNA, 21 nt, Artificial Sequence
  SAMD9 targeting guide sequence portion
gaauggguguggccugccgug

SEQ ID NO: 12429 - RNA, 21 nt, Artificial Sequence
  SAMD9 targeting guide sequence portion
gaggcacggcaaggcacggca

SEQ ID NO: 12430 - RNA, 21 nt, Artificial Sequence
  SAMD9 targeting guide sequence portion
gcaaggcacggcaggccacac

SEQ ID NO: 12431 - RNA, 21 nt, Artificial Sequence
  SAMD9 targeting guide sequence portion
gcacggcaaggcacggcaggc

SEQ ID NO: 12432 - RNA, 21 nt, Artificial Sequence
  SAMD9 targeting guide sequence portion
gcacggcaggccacacccauu

SEQ ID NO: 12433 - RNA, 21 nt, Artificial Sequence
  SAMD9 targeting guide sequence portion
gcaggccacacccauucuucc

SEQ ID NO: 12434 - RNA, 21 nt, Artificial Sequence
  SAMD9 targeting guide sequence portion
gccugccgugccuugccgugc

SEQ ID NO: 12435 - RNA, 21 nt, Artificial Sequence
  SAMD9 targeting guide sequence portion
ggaagaauggguguggccugc

SEQ ID NO: 12436 - RNA, 21 nt, Artificial Sequence
  SAMD9 targeting guide sequence portion
ggcaaggcacggcaggccaca

SEQ ID NO: 12437 - RNA, 21 nt, Artificial Sequence
  SAMD9 targeting guide sequence portion
ggcacggcaaggcacggcagg

SEQ ID NO: 12438 - RNA, 21 nt, Artificial Sequence
  SAMD9 targeting guide sequence portion
ggcacggcaggccacacccau

SEQ ID NO: 12439 - RNA, 21 nt, Artificial Sequence
  SAMD9 targeting guide sequence portion
ggcaggccacacccauucuuc

SEQ ID NO: 12440 - RNA, 21 nt, Artificial Sequence
  SAMD9 targeting guide sequence portion
ggccugccgugccuugccgug

SEQ ID NO: 12441 - RNA, 21 nt, Artificial Sequence
  SAMD9 targeting guide sequence portion
ggguguggccugccgugccuu

SEQ ID NO: 12442 - RNA, 21 nt, Artificial Sequence
  SAMD9 targeting guide sequence portion
gguguggccugccgugccuug

SEQ ID NO: 12443 - RNA, 21 nt, Artificial Sequence
  SAMD9 targeting guide sequence portion
guggccugccgugccuugccg

SEQ ID NO: 12444 - RNA, 21 nt, Artificial Sequence
  SAMD9 targeting guide sequence portion
guguggccugccgugccuugc

SEQ ID NO: 12445 - RNA, 21 nt, Artificial Sequence
  SAMD9 targeting guide sequence portion
ugccgugccuugccgugccuc

SEQ ID NO: 12446 - RNA, 21 nt, Artificial Sequence
  SAMD9 targeting guide sequence portion
uggaagaauggguguggccug

SEQ ID NO: 12447 - RNA, 21 nt, Artificial Sequence
  SAMD9 targeting guide sequence portion
uggccugccgugccuugccgu

SEQ ID NO: 12448 - RNA, 21 nt, Artificial Sequence
  SAMD9 targeting guide sequence portion
uggguguggccugccgugccu

SEQ ID NO: 12449 - RNA, 21 nt, Artificial Sequence
  SAMD9 targeting guide sequence portion
uguggccugccgugccuugcc

SEQ ID NO: 12450 - RNA, 22 nt, Artificial Sequence
  SAMD9 targeting guide sequence portion
aagaauggguguggccugccgu

SEQ ID NO: 12451 - RNA, 22 nt, Artificial Sequence
  SAMD9 targeting guide sequence portion
aaggcacggcaggccacaccca

SEQ ID NO: 12452 - RNA, 22 nt, Artificial Sequence
  SAMD9 targeting guide sequence portion
aauggaagaauggguguggccu

SEQ ID NO: 12453 - RNA, 22 nt, Artificial Sequence
  SAMD9 targeting guide sequence portion
aauggguguggccugccgugcc

SEQ ID NO: 12454 - RNA, 22 nt, Artificial Sequence
  SAMD9 targeting guide sequence portion
acggcaaggcacggcaggccac

SEQ ID NO: 12455 - RNA, 22 nt, Artificial Sequence
  SAMD9 targeting guide sequence portion
acggcaggccacacccauucuu

SEQ ID NO: 12456 - RNA, 22 nt, Artificial Sequence
  SAMD9 targeting guide sequence portion
agaauggguguggccugccgug

SEQ ID NO: 12457 - RNA, 22 nt, Artificial Sequence
  SAMD9 targeting guide sequence portion
aggcacggcaaggcacggcagg

SEQ ID NO: 12458 - RNA, 22 nt, Artificial Sequence
  SAMD9 targeting guide sequence portion
aggcacggcaggccacacccau

SEQ ID NO: 12459 - RNA, 22 nt, Artificial Sequence
  SAMD9 targeting guide sequence portion
aggccacacccauucuuccauu

SEQ ID NO: 12460 - RNA, 22 nt, Artificial Sequence
  SAMD9 targeting guide sequence portion
auggaagaauggguguggccug

SEQ ID NO: 12461 - RNA, 22 nt, Artificial Sequence
  SAMD9 targeting guide sequence portion
auggguguggccugccgugccu

SEQ ID NO: 12462 - RNA, 22 nt, Artificial Sequence
  SAMD9 targeting guide sequence portion
caaggcacggcaggccacaccc

SEQ ID NO: 12463 - RNA, 22 nt, Artificial Sequence
  SAMD9 targeting guide sequence portion
cacggcaaggcacggcaggcca

SEQ ID NO: 12464 - RNA, 22 nt, Artificial Sequence
  SAMD9 targeting guide sequence portion
cacggcaggccacacccauucu

SEQ ID NO: 12465 - RNA, 22 nt, Artificial Sequence
  SAMD9 targeting guide sequence portion
caggccacacccauucuuccau

SEQ ID NO: 12466 - RNA, 22 nt, Artificial Sequence
  SAMD9 targeting guide sequence portion
ccugccgugccuugccgugccu

SEQ ID NO: 12467 - RNA, 22 nt, Artificial Sequence
  SAMD9 targeting guide sequence portion
cgaggcacggcaaggcacggca

SEQ ID NO: 12468 - RNA, 22 nt, Artificial Sequence
  SAMD9 targeting guide sequence portion
cggcaaggcacggcaggccaca

SEQ ID NO: 12469 - RNA, 22 nt, Artificial Sequence
  SAMD9 targeting guide sequence portion
cggcaggccacacccauucuuc

SEQ ID NO: 12470 - RNA, 22 nt, Artificial Sequence
  SAMD9 targeting guide sequence portion
cugccgugccuugccgugccuc

SEQ ID NO: 12471 - RNA, 22 nt, Artificial Sequence
  SAMD9 targeting guide sequence portion
gaagaauggguguggccugccg

SEQ ID NO: 12472 - RNA, 22 nt, Artificial Sequence
  SAMD9 targeting guide sequence portion
gaauggguguggccugccgugc

SEQ ID NO: 12473 - RNA, 22 nt, Artificial Sequence
  SAMD9 targeting guide sequence portion
gaggcacggcaaggcacggcag

SEQ ID NO: 12474 - RNA, 22 nt, Artificial Sequence
  SAMD9 targeting guide sequence portion
gcaaggcacggcaggccacacc

SEQ ID NO: 12475 - RNA, 22 nt, Artificial Sequence
  SAMD9 targeting guide sequence portion
gcacggcaaggcacggcaggcc

SEQ ID NO: 12476 - RNA, 22 nt, Artificial Sequence
  SAMD9 targeting guide sequence portion
gcacggcaggccacacccauuc

SEQ ID NO: 12477 - RNA, 22 nt, Artificial Sequence
  SAMD9 targeting guide sequence portion
gcaggccacacccauucuucca

SEQ ID NO: 12478 - RNA, 22 nt, Artificial Sequence
  SAMD9 targeting guide sequence portion
gccugccgugccuugccgugcc

SEQ ID NO: 12479 - RNA, 22 nt, Artificial Sequence
  SAMD9 targeting guide sequence portion
ggaagaauggguguggccugcc

SEQ ID NO: 12480 - RNA, 22 nt, Artificial Sequence
  SAMD9 targeting guide sequence portion
ggcaaggcacggcaggccacac

SEQ ID NO: 12481 - RNA, 22 nt, Artificial Sequence
  SAMD9 targeting guide sequence portion
ggcacggcaaggcacggcaggc

SEQ ID NO: 12482 - RNA, 22 nt, Artificial Sequence
  SAMD9 targeting guide sequence portion
ggcacggcaggccacacccauu

SEQ ID NO: 12483 - RNA, 22 nt, Artificial Sequence
  SAMD9 targeting guide sequence portion
ggcaggccacacccauucuucc

SEQ ID NO: 12484 - RNA, 22 nt, Artificial Sequence
  SAMD9 targeting guide sequence portion
ggccugccgugccuugccgugc

SEQ ID NO: 12485 - RNA, 22 nt, Artificial Sequence
  SAMD9 targeting guide sequence portion
ggguguggccugccgugccuug

SEQ ID NO: 12486 - RNA, 22 nt, Artificial Sequence
  SAMD9 targeting guide sequence portion
gguguggccugccgugccuugc

SEQ ID NO: 12487 - RNA, 22 nt, Artificial Sequence
  SAMD9 targeting guide sequence portion
guggccugccgugccuugccgu

SEQ ID NO: 12488 - RNA, 22 nt, Artificial Sequence
  SAMD9 targeting guide sequence portion
guguggccugccgugccuugcc

SEQ ID NO: 12489 - RNA, 22 nt, Artificial Sequence
  SAMD9 targeting guide sequence portion
ugccgugccuugccgugccucg

SEQ ID NO: 12490 - RNA, 22 nt, Artificial Sequence
  SAMD9 targeting guide sequence portion
uggaagaauggguguggccugc

SEQ ID NO: 12491 - RNA, 22 nt, Artificial Sequence
  SAMD9 targeting guide sequence portion
uggccugccgugccuugccgug

SEQ ID NO: 12492 - RNA, 22 nt, Artificial Sequence
  SAMD9 targeting guide sequence portion
uggguguggccugccgugccuu

SEQ ID NO: 12493 - RNA, 22 nt, Artificial Sequence
  SAMD9 targeting guide sequence portion
uguggccugccgugccuugccg

SEQ ID NO: 12494 - RNA, 20 nt, Artificial Sequence
  SAMD9 targeting guide sequence portion
aagccugggggaggggcguc

SEQ ID NO: 12495 - RNA, 20 nt, Artificial Sequence
  SAMD9 targeting guide sequence portion
aaggcggcagcaagccuggg

SEQ ID NO: 12496 - RNA, 20 nt, Artificial Sequence
  SAMD9 targeting guide sequence portion
aaugguggacgccccucccc

SEQ ID NO: 12497 - RNA, 20 nt, Artificial Sequence
  SAMD9 targeting guide sequence portion
acgccccucccccaggcuug

SEQ ID NO: 12498 - RNA, 20 nt, Artificial Sequence
  SAMD9 targeting guide sequence portion
acugcaaggcggcagcaagc

SEQ ID NO: 12499 - RNA, 20 nt, Artificial Sequence
  SAMD9 targeting guide sequence portion
agcaagccugggggaggggc

SEQ ID NO: 12500 - RNA, 20 nt, Artificial Sequence
  SAMD9 targeting guide sequence portion
agccugggggaggggcgucc

SEQ ID NO: 12501 - RNA, 20 nt, Artificial Sequence
  SAMD9 targeting guide sequence portion
aggcggcagcaagccugggg

SEQ ID NO: 12502 - RNA, 20 nt, Artificial Sequence
  SAMD9 targeting guide sequence portion
aggcuugcugccgccuugca

SEQ ID NO: 12503 - RNA, 20 nt, Artificial Sequence
  SAMD9 targeting guide sequence portion
augguggacgccccuccccc

SEQ ID NO: 12504 - RNA, 20 nt, Artificial Sequence
  SAMD9 targeting guide sequence portion
auugaacugcaaggcggcag

SEQ ID NO: 12505 - RNA, 20 nt, Artificial Sequence
  SAMD9 targeting guide sequence portion
caagccugggggaggggcgu

SEQ ID NO: 12506 - RNA, 20 nt, Artificial Sequence
  SAMD9 targeting guide sequence portion
caaggcggcagcaagccugg

SEQ ID NO: 12507 - RNA, 20 nt, Artificial Sequence
  SAMD9 targeting guide sequence portion
caaugguggacgccccuccc

SEQ ID NO: 12508 - RNA, 20 nt, Artificial Sequence
  SAMD9 targeting guide sequence portion
cagcaagccugggggagggg

SEQ ID NO: 12509 - RNA, 20 nt, Artificial Sequence
  SAMD9 targeting guide sequence portion
caggcuugcugccgccuugc

SEQ ID NO: 12510 - RNA, 20 nt, Artificial Sequence
  SAMD9 targeting guide sequence portion
ccaggcuugcugccgccuug

SEQ ID NO: 12511 - RNA, 20 nt, Artificial Sequence
  SAMD9 targeting guide sequence portion
ccccaggcuugcugccgccu

SEQ ID NO: 12512 - RNA, 20 nt, Artificial Sequence
  SAMD9 targeting guide sequence portion
cccccaggcuugcugccgcc

SEQ ID NO: 12513 - RNA, 20 nt, Artificial Sequence
  SAMD9 targeting guide sequence portion
ccccucccccaggcuugcug

SEQ ID NO: 12514 - RNA, 20 nt, Artificial Sequence
  SAMD9 targeting guide sequence portion
cccucccccaggcuugcugc

SEQ ID NO: 12515 - RNA, 20 nt, Artificial Sequence
  SAMD9 targeting guide sequence portion
ccucccccaggcuugcugcc

SEQ ID NO: 12516 - RNA, 20 nt, Artificial Sequence
  SAMD9 targeting guide sequence portion
ccugggggaggggcguccac

SEQ ID NO: 12517 - RNA, 20 nt, Artificial Sequence
  SAMD9 targeting guide sequence portion
cgccccucccccaggcuugc

SEQ ID NO: 12518 - RNA, 20 nt, Artificial Sequence
  SAMD9 targeting guide sequence portion
cggcagcaagccugggggag

SEQ ID NO: 12519 - RNA, 20 nt, Artificial Sequence
  SAMD9 targeting guide sequence portion
cucccccaggcuugcugccg

SEQ ID NO: 12520 - RNA, 20 nt, Artificial Sequence
  SAMD9 targeting guide sequence portion
cugcaaggcggcagcaagcc

SEQ ID NO: 12521 - RNA, 20 nt, Artificial Sequence
  SAMD9 targeting guide sequence portion
gaacugcaaggcggcagcaa

SEQ ID NO: 12522 - RNA, 20 nt, Artificial Sequence
  SAMD9 targeting guide sequence portion
gacgccccucccccaggcuu

SEQ ID NO: 12523 - RNA, 20 nt, Artificial Sequence
  SAMD9 targeting guide sequence portion
gauugaacugcaaggcggca

SEQ ID NO: 12524 - RNA, 20 nt, Artificial Sequence
  SAMD9 targeting guide sequence portion
gcaagccugggggaggggcg

SEQ ID NO: 12525 - RNA, 20 nt, Artificial Sequence
  SAMD9 targeting guide sequence portion
gcaaggcggcagcaagccug

SEQ ID NO: 12526 - RNA, 20 nt, Artificial Sequence
  SAMD9 targeting guide sequence portion
gcaaugguggacgccccucc

SEQ ID NO: 12527 - RNA, 20 nt, Artificial Sequence
  SAMD9 targeting guide sequence portion
gcagcaagccugggggaggg

SEQ ID NO: 12528 - RNA, 20 nt, Artificial Sequence
  SAMD9 targeting guide sequence portion
gccccucccccaggcuugcu

SEQ ID NO: 12529 - RNA, 20 nt, Artificial Sequence
  SAMD9 targeting guide sequence portion
gccugggggaggggcgucca

SEQ ID NO: 12530 - RNA, 20 nt, Artificial Sequence
  SAMD9 targeting guide sequence portion
gcggcagcaagccuggggga

SEQ ID NO: 12531 - RNA, 20 nt, Artificial Sequence
  SAMD9 targeting guide sequence portion
gcuugcugccgccuugcagu

SEQ ID NO: 12532 - RNA, 20 nt, Artificial Sequence
  SAMD9 targeting guide sequence portion
ggacgccccucccccaggcu

SEQ ID NO: 12533 - RNA, 20 nt, Artificial Sequence
  SAMD9 targeting guide sequence portion
ggcagcaagccugggggagg

SEQ ID NO: 12534 - RNA, 20 nt, Artificial Sequence
  SAMD9 targeting guide sequence portion
ggcggcagcaagccuggggg

SEQ ID NO: 12535 - RNA, 20 nt, Artificial Sequence
  SAMD9 targeting guide sequence portion
ggcuugcugccgccuugcag

SEQ ID NO: 12536 - RNA, 20 nt, Artificial Sequence
  SAMD9 targeting guide sequence portion
gguggacgccccucccccag

SEQ ID NO: 12537 - RNA, 20 nt, Artificial Sequence
  SAMD9 targeting guide sequence portion
guggacgccccucccccagg

SEQ ID NO: 12538 - RNA, 20 nt, Artificial Sequence
  SAMD9 targeting guide sequence portion
ucccccaggcuugcugccgc

SEQ ID NO: 12539 - RNA, 20 nt, Artificial Sequence
  SAMD9 targeting guide sequence portion
ugaacugcaaggcggcagca

SEQ ID NO: 12540 - RNA, 20 nt, Artificial Sequence
  SAMD9 targeting guide sequence portion
ugcaaggcggcagcaagccu

SEQ ID NO: 12541 - RNA, 20 nt, Artificial Sequence
  SAMD9 targeting guide sequence portion
uggacgccccucccccaggc

SEQ ID NO: 12542 - RNA, 20 nt, Artificial Sequence
  SAMD9 targeting guide sequence portion
ugguggacgccccuccccca

SEQ ID NO: 12543 - RNA, 20 nt, Artificial Sequence
  SAMD9 targeting guide sequence portion
uugaacugcaaggcggcagc

SEQ ID NO: 12544 - RNA, 21 nt, Artificial Sequence
  SAMD9 targeting guide sequence portion
aacugcaaggcggcagcaagc

SEQ ID NO: 12545 - RNA, 21 nt, Artificial Sequence
  SAMD9 targeting guide sequence portion
aagccugggggaggggcgucc

SEQ ID NO: 12546 - RNA, 21 nt, Artificial Sequence
  SAMD9 targeting guide sequence portion
aaggcggcagcaagccugggg

SEQ ID NO: 12547 - RNA, 21 nt, Artificial Sequence
  SAMD9 targeting guide sequence portion
aaugguggacgccccuccccc

SEQ ID NO: 12548 - RNA, 21 nt, Artificial Sequence
  SAMD9 targeting guide sequence portion
acgccccucccccaggcuugc

SEQ ID NO: 12549 - RNA, 21 nt, Artificial Sequence
  SAMD9 targeting guide sequence portion
acugcaaggcggcagcaagcc

SEQ ID NO: 12550 - RNA, 21 nt, Artificial Sequence
  SAMD9 targeting guide sequence portion
agauugaacugcaaggcggca

SEQ ID NO: 12551 - RNA, 21 nt, Artificial Sequence
  SAMD9 targeting guide sequence portion
agcaagccugggggaggggcg

SEQ ID NO: 12552 - RNA, 21 nt, Artificial Sequence
  SAMD9 targeting guide sequence portion
agcaaugguggacgccccucc

SEQ ID NO: 12553 - RNA, 21 nt, Artificial Sequence
  SAMD9 targeting guide sequence portion
agccugggggaggggcgucca

SEQ ID NO: 12554 - RNA, 21 nt, Artificial Sequence
  SAMD9 targeting guide sequence portion
aggcggcagcaagccuggggg

SEQ ID NO: 12555 - RNA, 21 nt, Artificial Sequence
  SAMD9 targeting guide sequence portion
aggcuugcugccgccuugcag

SEQ ID NO: 12556 - RNA, 21 nt, Artificial Sequence
  SAMD9 targeting guide sequence portion
augguggacgccccuccccca

SEQ ID NO: 12557 - RNA, 21 nt, Artificial Sequence
  SAMD9 targeting guide sequence portion
auugaacugcaaggcggcagc

SEQ ID NO: 12558 - RNA, 21 nt, Artificial Sequence
  SAMD9 targeting guide sequence portion
caagccugggggaggggcguc

SEQ ID NO: 12559 - RNA, 21 nt, Artificial Sequence
  SAMD9 targeting guide sequence portion
caaggcggcagcaagccuggg

SEQ ID NO: 12560 - RNA, 21 nt, Artificial Sequence
  SAMD9 targeting guide sequence portion
caaugguggacgccccucccc

SEQ ID NO: 12561 - RNA, 21 nt, Artificial Sequence
  SAMD9 targeting guide sequence portion
cagcaagccugggggaggggc

SEQ ID NO: 12562 - RNA, 21 nt, Artificial Sequence
  SAMD9 targeting guide sequence portion
caggcuugcugccgccuugca

SEQ ID NO: 12563 - RNA, 21 nt, Artificial Sequence
  SAMD9 targeting guide sequence portion
ccaggcuugcugccgccuugc

SEQ ID NO: 12564 - RNA, 21 nt, Artificial Sequence
  SAMD9 targeting guide sequence portion
cccaggcuugcugccgccuug

SEQ ID NO: 12565 - RNA, 21 nt, Artificial Sequence
  SAMD9 targeting guide sequence portion
ccccaggcuugcugccgccuu

SEQ ID NO: 12566 - RNA, 21 nt, Artificial Sequence
  SAMD9 targeting guide sequence portion
cccccaggcuugcugccgccu

SEQ ID NO: 12567 - RNA, 21 nt, Artificial Sequence
  SAMD9 targeting guide sequence portion
ccccucccccaggcuugcugc

SEQ ID NO: 12568 - RNA, 21 nt, Artificial Sequence
  SAMD9 targeting guide sequence portion
cccucccccaggcuugcugcc

SEQ ID NO: 12569 - RNA, 21 nt, Artificial Sequence
  SAMD9 targeting guide sequence portion
ccucccccaggcuugcugccg

SEQ ID NO: 12570 - RNA, 21 nt, Artificial Sequence
  SAMD9 targeting guide sequence portion
ccugggggaggggcguccacc

SEQ ID NO: 12571 - RNA, 21 nt, Artificial Sequence
  SAMD9 targeting guide sequence portion
cgccccucccccaggcuugcu

SEQ ID NO: 12572 - RNA, 21 nt, Artificial Sequence
  SAMD9 targeting guide sequence portion
cggcagcaagccugggggagg

SEQ ID NO: 12573 - RNA, 21 nt, Artificial Sequence
  SAMD9 targeting guide sequence portion
cucccccaggcuugcugccgc

SEQ ID NO: 12574 - RNA, 21 nt, Artificial Sequence
  SAMD9 targeting guide sequence portion
cugcaaggcggcagcaagccu

SEQ ID NO: 12575 - RNA, 21 nt, Artificial Sequence
  SAMD9 targeting guide sequence portion
gaacugcaaggcggcagcaag

SEQ ID NO: 12576 - RNA, 21 nt, Artificial Sequence
  SAMD9 targeting guide sequence portion
gacgccccucccccaggcuug

SEQ ID NO: 12577 - RNA, 21 nt, Artificial Sequence
  SAMD9 targeting guide sequence portion
gauugaacugcaaggcggcag

SEQ ID NO: 12578 - RNA, 21 nt, Artificial Sequence
  SAMD9 targeting guide sequence portion
gcaagccugggggaggggcgu

SEQ ID NO: 12579 - RNA, 21 nt, Artificial Sequence
  SAMD9 targeting guide sequence portion
gcaaggcggcagcaagccugg

SEQ ID NO: 12580 - RNA, 21 nt, Artificial Sequence
  SAMD9 targeting guide sequence portion
gcaaugguggacgccccuccc

SEQ ID NO: 12581 - RNA, 21 nt, Artificial Sequence
  SAMD9 targeting guide sequence portion
gcagcaagccugggggagggg

SEQ ID NO: 12582 - RNA, 21 nt, Artificial Sequence
  SAMD9 targeting guide sequence portion
gccccucccccaggcuugcug

SEQ ID NO: 12583 - RNA, 21 nt, Artificial Sequence
  SAMD9 targeting guide sequence portion
gccugggggaggggcguccac

SEQ ID NO: 12584 - RNA, 21 nt, Artificial Sequence
  SAMD9 targeting guide sequence portion
gcggcagcaagccugggggag

SEQ ID NO: 12585 - RNA, 21 nt, Artificial Sequence
  SAMD9 targeting guide sequence portion
gcuugcugccgccuugcaguu

SEQ ID NO: 12586 - RNA, 21 nt, Artificial Sequence
  SAMD9 targeting guide sequence portion
ggacgccccucccccaggcuu

SEQ ID NO: 12587 - RNA, 21 nt, Artificial Sequence
  SAMD9 targeting guide sequence portion
ggcagcaagccugggggaggg

SEQ ID NO: 12588 - RNA, 21 nt, Artificial Sequence
  SAMD9 targeting guide sequence portion
ggcggcagcaagccuggggga

SEQ ID NO: 12589 - RNA, 21 nt, Artificial Sequence
  SAMD9 targeting guide sequence portion
ggcuugcugccgccuugcagu

SEQ ID NO: 12590 - RNA, 21 nt, Artificial Sequence
  SAMD9 targeting guide sequence portion
gguggacgccccucccccagg

SEQ ID NO: 12591 - RNA, 21 nt, Artificial Sequence
  SAMD9 targeting guide sequence portion
guggacgccccucccccaggc

SEQ ID NO: 12592 - RNA, 21 nt, Artificial Sequence
  SAMD9 targeting guide sequence portion
ucccccaggcuugcugccgcc

SEQ ID NO: 12593 - RNA, 21 nt, Artificial Sequence
  SAMD9 targeting guide sequence portion
ugaacugcaaggcggcagcaa

SEQ ID NO: 12594 - RNA, 21 nt, Artificial Sequence
  SAMD9 targeting guide sequence portion
ugcaaggcggcagcaagccug

SEQ ID NO: 12595 - RNA, 21 nt, Artificial Sequence
  SAMD9 targeting guide sequence portion
uggacgccccucccccaggcu

SEQ ID NO: 12596 - RNA, 21 nt, Artificial Sequence
  SAMD9 targeting guide sequence portion
ugguggacgccccucccccag

SEQ ID NO: 12597 - RNA, 21 nt, Artificial Sequence
  SAMD9 targeting guide sequence portion
uugaacugcaaggcggcagca

SEQ ID NO: 12598 - RNA, 22 nt, Artificial Sequence
  SAMD9 targeting guide sequence portion
aacugcaaggcggcagcaagcc

SEQ ID NO: 12599 - RNA, 22 nt, Artificial Sequence
  SAMD9 targeting guide sequence portion
aagccugggggaggggcgucca

SEQ ID NO: 12600 - RNA, 22 nt, Artificial Sequence
  SAMD9 targeting guide sequence portion
aaggcggcagcaagccuggggg

SEQ ID NO: 12601 - RNA, 22 nt, Artificial Sequence
  SAMD9 targeting guide sequence portion
aaugguggacgccccuccccca

SEQ ID NO: 12602 - RNA, 22 nt, Artificial Sequence
  SAMD9 targeting guide sequence portion
acgccccucccccaggcuugcu

SEQ ID NO: 12603 - RNA, 22 nt, Artificial Sequence
  SAMD9 targeting guide sequence portion
acugcaaggcggcagcaagccu

SEQ ID NO: 12604 - RNA, 22 nt, Artificial Sequence
  SAMD9 targeting guide sequence portion
agauugaacugcaaggcggcag

SEQ ID NO: 12605 - RNA, 22 nt, Artificial Sequence
  SAMD9 targeting guide sequence portion
agcaagccugggggaggggcgu

SEQ ID NO: 12606 - RNA, 22 nt, Artificial Sequence
  SAMD9 targeting guide sequence portion
agcaaugguggacgccccuccc

SEQ ID NO: 12607 - RNA, 22 nt, Artificial Sequence
  SAMD9 targeting guide sequence portion
agccugggggaggggcguccac

SEQ ID NO: 12608 - RNA, 22 nt, Artificial Sequence
  SAMD9 targeting guide sequence portion
aggcggcagcaagccuggggga

SEQ ID NO: 12609 - RNA, 22 nt, Artificial Sequence
  SAMD9 targeting guide sequence portion
aggcuugcugccgccuugcagu

SEQ ID NO: 12610 - RNA, 22 nt, Artificial Sequence
  SAMD9 targeting guide sequence portion
augguggacgccccucccccag

SEQ ID NO: 12611 - RNA, 22 nt, Artificial Sequence
  SAMD9 targeting guide sequence portion
auugaacugcaaggcggcagca

SEQ ID NO: 12612 - RNA, 22 nt, Artificial Sequence
  SAMD9 targeting guide sequence portion
caagccugggggaggggcgucc

SEQ ID NO: 12613 - RNA, 22 nt, Artificial Sequence
  SAMD9 targeting guide sequence portion
caaggcggcagcaagccugggg

SEQ ID NO: 12614 - RNA, 22 nt, Artificial Sequence
  SAMD9 targeting guide sequence portion
caaugguggacgccccuccccc

SEQ ID NO: 12615 - RNA, 22 nt, Artificial Sequence
  SAMD9 targeting guide sequence portion
cagcaagccugggggaggggcg

SEQ ID NO: 12616 - RNA, 22 nt, Artificial Sequence
  SAMD9 targeting guide sequence portion
cagcaaugguggacgccccucc

SEQ ID NO: 12617 - RNA, 22 nt, Artificial Sequence
  SAMD9 targeting guide sequence portion
caggcuugcugccgccuugcag

SEQ ID NO: 12618 - RNA, 22 nt, Artificial Sequence
  SAMD9 targeting guide sequence portion
ccaggcuugcugccgccuugca

SEQ ID NO: 12619 - RNA, 22 nt, Artificial Sequence
  SAMD9 targeting guide sequence portion
cccaggcuugcugccgccuugc

SEQ ID NO: 12620 - RNA, 22 nt, Artificial Sequence
  SAMD9 targeting guide sequence portion
ccccaggcuugcugccgccuug

SEQ ID NO: 12621 - RNA, 22 nt, Artificial Sequence
  SAMD9 targeting guide sequence portion
cccccaggcuugcugccgccuu

SEQ ID NO: 12622 - RNA, 22 nt, Artificial Sequence
  SAMD9 targeting guide sequence portion
ccccucccccaggcuugcugcc

SEQ ID NO: 12623 - RNA, 22 nt, Artificial Sequence
  SAMD9 targeting guide sequence portion
cccucccccaggcuugcugccg

SEQ ID NO: 12624 - RNA, 22 nt, Artificial Sequence
  SAMD9 targeting guide sequence portion
ccucccccaggcuugcugccgc

SEQ ID NO: 12625 - RNA, 22 nt, Artificial Sequence
  SAMD9 targeting guide sequence portion
ccugggggaggggcguccacca

SEQ ID NO: 12626 - RNA, 22 nt, Artificial Sequence
  SAMD9 targeting guide sequence portion
cgccccucccccaggcuugcug

SEQ ID NO: 12627 - RNA, 22 nt, Artificial Sequence
  SAMD9 targeting guide sequence portion
cggcagcaagccugggggaggg

SEQ ID NO: 12628 - RNA, 22 nt, Artificial Sequence
  SAMD9 targeting guide sequence portion
cucccccaggcuugcugccgcc

SEQ ID NO: 12629 - RNA, 22 nt, Artificial Sequence
  SAMD9 targeting guide sequence portion
cugcaaggcggcagcaagccug

SEQ ID NO: 12630 - RNA, 22 nt, Artificial Sequence
  SAMD9 targeting guide sequence portion
gaacugcaaggcggcagcaagc

SEQ ID NO: 12631 - RNA, 22 nt, Artificial Sequence
  SAMD9 targeting guide sequence portion
gacgccccucccccaggcuugc

SEQ ID NO: 12632 - RNA, 22 nt, Artificial Sequence
  SAMD9 targeting guide sequence portion
gagauugaacugcaaggcggca

SEQ ID NO: 12633 - RNA, 22 nt, Artificial Sequence
  SAMD9 targeting guide sequence portion
gauugaacugcaaggcggcagc

SEQ ID NO: 12634 - RNA, 22 nt, Artificial Sequence
  SAMD9 targeting guide sequence portion
gcaagccugggggaggggcguc

SEQ ID NO: 12635 - RNA, 22 nt, Artificial Sequence
  SAMD9 targeting guide sequence portion
gcaaggcggcagcaagccuggg

SEQ ID NO: 12636 - RNA, 22 nt, Artificial Sequence
  SAMD9 targeting guide sequence portion
gcaaugguggacgccccucccc

SEQ ID NO: 12637 - RNA, 22 nt, Artificial Sequence
  SAMD9 targeting guide sequence portion
gcagcaagccugggggaggggc

SEQ ID NO: 12638 - RNA, 22 nt, Artificial Sequence
  SAMD9 targeting guide sequence portion
gccccucccccaggcuugcugc

SEQ ID NO: 12639 - RNA, 22 nt, Artificial Sequence
  SAMD9 targeting guide sequence portion
gccugggggaggggcguccacc

SEQ ID NO: 12640 - RNA, 22 nt, Artificial Sequence
  SAMD9 targeting guide sequence portion
gcggcagcaagccugggggagg

SEQ ID NO: 12641 - RNA, 22 nt, Artificial Sequence
  SAMD9 targeting guide sequence portion
gcuugcugccgccuugcaguuc

SEQ ID NO: 12642 - RNA, 22 nt, Artificial Sequence
  SAMD9 targeting guide sequence portion
ggacgccccucccccaggcuug

SEQ ID NO: 12643 - RNA, 22 nt, Artificial Sequence
  SAMD9 targeting guide sequence portion
ggcagcaagccugggggagggg

SEQ ID NO: 12644 - RNA, 22 nt, Artificial Sequence
  SAMD9 targeting guide sequence portion
ggcggcagcaagccugggggag

SEQ ID NO: 12645 - RNA, 22 nt, Artificial Sequence
  SAMD9 targeting guide sequence portion
ggcuugcugccgccuugcaguu

SEQ ID NO: 12646 - RNA, 22 nt, Artificial Sequence
  SAMD9 targeting guide sequence portion
gguggacgccccucccccaggc

SEQ ID NO: 12647 - RNA, 22 nt, Artificial Sequence
  SAMD9 targeting guide sequence portion
guggacgccccucccccaggcu

SEQ ID NO: 12648 - RNA, 22 nt, Artificial Sequence
  SAMD9 targeting guide sequence portion
ucccccaggcuugcugccgccu

SEQ ID NO: 12649 - RNA, 22 nt, Artificial Sequence
  SAMD9 targeting guide sequence portion
ugaacugcaaggcggcagcaag

SEQ ID NO: 12650 - RNA, 22 nt, Artificial Sequence
  SAMD9 targeting guide sequence portion
ugcaaggcggcagcaagccugg

SEQ ID NO: 12651 - RNA, 22 nt, Artificial Sequence
  SAMD9 targeting guide sequence portion
uggacgccccucccccaggcuu

SEQ ID NO: 12652 - RNA, 22 nt, Artificial Sequence
  SAMD9 targeting guide sequence portion
ugguggacgccccucccccagg

SEQ ID NO: 12653 - RNA, 22 nt, Artificial Sequence
  SAMD9 targeting guide sequence portion
uugaacugcaaggcggcagcaa

SEQ ID NO: 12654 - RNA, 20 nt, Artificial Sequence
  SAMD9 targeting guide sequence portion
acaucccugucugacagcuu

SEQ ID NO: 12655 - RNA, 20 nt, Artificial Sequence
  SAMD9 targeting guide sequence portion
aucccugucugacagcuuug

SEQ ID NO: 12656 - RNA, 20 nt, Artificial Sequence
  SAMD9 targeting guide sequence portion
caucccugucugacagcuuu

SEQ ID NO: 12657 - RNA, 20 nt, Artificial Sequence
  SAMD9 targeting guide sequence portion
cccugucugacagcuuugaa

SEQ ID NO: 12658 - RNA, 20 nt, Artificial Sequence
  SAMD9 targeting guide sequence portion
ccugucugacagcuuugaaa

SEQ ID NO: 12659 - RNA, 20 nt, Artificial Sequence
  SAMD9 targeting guide sequence portion
ccuuucaaagcugucagaca

SEQ ID NO: 12660 - RNA, 20 nt, Artificial Sequence
  SAMD9 targeting guide sequence portion
cuccuuucaaagcugucaga

SEQ ID NO: 12661 - RNA, 20 nt, Artificial Sequence
  SAMD9 targeting guide sequence portion
cuuucaaagcugucagacag

SEQ ID NO: 12662 - RNA, 20 nt, Artificial Sequence
  SAMD9 targeting guide sequence portion
gcuccuuucaaagcugucag

SEQ ID NO: 12663 - RNA, 20 nt, Artificial Sequence
  SAMD9 targeting guide sequence portion
ucccugucugacagcuuuga

SEQ ID NO: 12664 - RNA, 20 nt, Artificial Sequence
  SAMD9 targeting guide sequence portion
uccuuucaaagcugucagac

SEQ ID NO: 12665 - RNA, 20 nt, Artificial Sequence
  SAMD9 targeting guide sequence portion
ugcuccuuucaaagcuguca

SEQ ID NO: 12666 - RNA, 21 nt, Artificial Sequence
  SAMD9 targeting guide sequence portion
aacaucccugucugacagcuu

SEQ ID NO: 12667 - RNA, 21 nt, Artificial Sequence
  SAMD9 targeting guide sequence portion
acaucccugucugacagcuuu

SEQ ID NO: 12668 - RNA, 21 nt, Artificial Sequence
  SAMD9 targeting guide sequence portion
aucccugucugacagcuuuga

SEQ ID NO: 12669 - RNA, 21 nt, Artificial Sequence
  SAMD9 targeting guide sequence portion
caucccugucugacagcuuug

SEQ ID NO: 12670 - RNA, 21 nt, Artificial Sequence
  SAMD9 targeting guide sequence portion
cccugucugacagcuuugaaa

SEQ ID NO: 12671 - RNA, 21 nt, Artificial Sequence
  SAMD9 targeting guide sequence portion
ccugucugacagcuuugaaag

SEQ ID NO: 12672 - RNA, 21 nt, Artificial Sequence
  SAMD9 targeting guide sequence portion
ccuuucaaagcugucagacag

SEQ ID NO: 12673 - RNA, 21 nt, Artificial Sequence
  SAMD9 targeting guide sequence portion
cuccuuucaaagcugucagac

SEQ ID NO: 12674 - RNA, 21 nt, Artificial Sequence
  SAMD9 targeting guide sequence portion
cugcuccuuucaaagcuguca

SEQ ID NO: 12675 - RNA, 21 nt, Artificial Sequence
  SAMD9 targeting guide sequence portion
cuuucaaagcugucagacagg

SEQ ID NO: 12676 - RNA, 21 nt, Artificial Sequence
  SAMD9 targeting guide sequence portion
gcuccuuucaaagcugucaga

SEQ ID NO: 12677 - RNA, 21 nt, Artificial Sequence
  SAMD9 targeting guide sequence portion
ucccugucugacagcuuugaa

SEQ ID NO: 12678 - RNA, 21 nt, Artificial Sequence
  SAMD9 targeting guide sequence portion
uccuuucaaagcugucagaca

SEQ ID NO: 12679 - RNA, 21 nt, Artificial Sequence
  SAMD9 targeting guide sequence portion
ugcuccuuucaaagcugucag

SEQ ID NO: 12680 - RNA, 22 nt, Artificial Sequence
  SAMD9 targeting guide sequence portion
aaacaucccugucugacagcuu

SEQ ID NO: 12681 - RNA, 22 nt, Artificial Sequence
  SAMD9 targeting guide sequence portion
aacaucccugucugacagcuuu

SEQ ID NO: 12682 - RNA, 22 nt, Artificial Sequence
  SAMD9 targeting guide sequence portion
acaucccugucugacagcuuug

SEQ ID NO: 12683 - RNA, 22 nt, Artificial Sequence
  SAMD9 targeting guide sequence portion
acugcuccuuucaaagcuguca

SEQ ID NO: 12684 - RNA, 22 nt, Artificial Sequence
  SAMD9 targeting guide sequence portion
aucccugucugacagcuuugaa

SEQ ID NO: 12685 - RNA, 22 nt, Artificial Sequence
  SAMD9 targeting guide sequence portion
caucccugucugacagcuuuga

SEQ ID NO: 12686 - RNA, 22 nt, Artificial Sequence
  SAMD9 targeting guide sequence portion
cccugucugacagcuuugaaag

SEQ ID NO: 12687 - RNA, 22 nt, Artificial Sequence
  SAMD9 targeting guide sequence portion
ccugucugacagcuuugaaagg

SEQ ID NO: 12688 - RNA, 22 nt, Artificial Sequence
  SAMD9 targeting guide sequence portion
ccuuucaaagcugucagacagg

SEQ ID NO: 12689 - RNA, 22 nt, Artificial Sequence
  SAMD9 targeting guide sequence portion
cuccuuucaaagcugucagaca

SEQ ID NO: 12690 - RNA, 22 nt, Artificial Sequence
  SAMD9 targeting guide sequence portion
cugcuccuuucaaagcugucag

SEQ ID NO: 12691 - RNA, 22 nt, Artificial Sequence
  SAMD9 targeting guide sequence portion
cuuucaaagcugucagacaggg

SEQ ID NO: 12692 - RNA, 22 nt, Artificial Sequence
  SAMD9 targeting guide sequence portion
gcuccuuucaaagcugucagac

SEQ ID NO: 12693 - RNA, 22 nt, Artificial Sequence
  SAMD9 targeting guide sequence portion
ucccugucugacagcuuugaaa

SEQ ID NO: 12694 - RNA, 22 nt, Artificial Sequence
  SAMD9 targeting guide sequence portion
uccuuucaaagcugucagacag

SEQ ID NO: 12695 - RNA, 22 nt, Artificial Sequence
  SAMD9 targeting guide sequence portion
ugcuccuuucaaagcugucaga

SEQ ID NO: 12696 - RNA, 20 nt, Artificial Sequence
  SAMD9 targeting guide sequence portion
aaagcugucagacagagaug

SEQ ID NO: 12697 - RNA, 20 nt, Artificial Sequence
  SAMD9 targeting guide sequence portion
aacaucucugucugacagcu

SEQ ID NO: 12698 - RNA, 20 nt, Artificial Sequence
  SAMD9 targeting guide sequence portion
aagcugucagacagagaugu

SEQ ID NO: 12699 - RNA, 20 nt, Artificial Sequence
  SAMD9 targeting guide sequence portion
acaucucugucugacagcuu

SEQ ID NO: 12700 - RNA, 20 nt, Artificial Sequence
  SAMD9 targeting guide sequence portion
acuuaaacaucucugucuga

SEQ ID NO: 12701 - RNA, 20 nt, Artificial Sequence
  SAMD9 targeting guide sequence portion
aucucugucugacagcuuug

SEQ ID NO: 12702 - RNA, 20 nt, Artificial Sequence
  SAMD9 targeting guide sequence portion
caucucugucugacagcuuu

SEQ ID NO: 12703 - RNA, 20 nt, Artificial Sequence
  SAMD9 targeting guide sequence portion
cucugucugacagcuuugaa

SEQ ID NO: 12704 - RNA, 20 nt, Artificial Sequence
  SAMD9 targeting guide sequence portion
cuuaaacaucucugucugac

SEQ ID NO: 12705 - RNA, 20 nt, Artificial Sequence
  SAMD9 targeting guide sequence portion
ucucugucugacagcuuuga

SEQ ID NO: 12706 - RNA, 20 nt, Artificial Sequence
  SAMD9 targeting guide sequence portion
ucugucugacagcuuugaaa

SEQ ID NO: 12707 - RNA, 20 nt, Artificial Sequence
  SAMD9 targeting guide sequence portion
uuucaaagcugucagacaga

SEQ ID NO: 12708 - RNA, 21 nt, Artificial Sequence
  SAMD9 targeting guide sequence portion
aaacaucucugucugacagcu

SEQ ID NO: 12709 - RNA, 21 nt, Artificial Sequence
  SAMD9 targeting guide sequence portion
aaagcugucagacagagaugu

SEQ ID NO: 12710 - RNA, 21 nt, Artificial Sequence
  SAMD9 targeting guide sequence portion
aacaucucugucugacagcuu

SEQ ID NO: 12711 - RNA, 21 nt, Artificial Sequence
  SAMD9 targeting guide sequence portion
aagaaacuucugcagacuuaa

SEQ ID NO: 12712 - RNA, 21 nt, Artificial Sequence
  SAMD9 targeting guide sequence portion
aagcugucagacagagauguu

SEQ ID NO: 12713 - RNA, 21 nt, Artificial Sequence
  SAMD9 targeting guide sequence portion
acaucucugucugacagcuuu

SEQ ID NO: 12714 - RNA, 21 nt, Artificial Sequence
  SAMD9 targeting guide sequence portion
acuuaaacaucucugucugac

SEQ ID NO: 12715 - RNA, 21 nt, Artificial Sequence
  SAMD9 targeting guide sequence portion
agauguuuaagucugcagaag

SEQ ID NO: 12716 - RNA, 21 nt, Artificial Sequence
  SAMD9 targeting guide sequence portion
aucucugucugacagcuuuga

SEQ ID NO: 12717 - RNA, 21 nt, Artificial Sequence
  SAMD9 targeting guide sequence portion
caaagcugucagacagagaug

SEQ ID NO: 12718 - RNA, 21 nt, Artificial Sequence
  SAMD9 targeting guide sequence portion
caucucugucugacagcuuug

SEQ ID NO: 12719 - RNA, 21 nt, Artificial Sequence
  SAMD9 targeting guide sequence portion
cucugucugacagcuuugaaa

SEQ ID NO: 12720 - RNA, 21 nt, Artificial Sequence
  SAMD9 targeting guide sequence portion
cugucagacagagauguuuaa

SEQ ID NO: 12721 - RNA, 21 nt, Artificial Sequence
  SAMD9 targeting guide sequence portion
cuuaaacaucucugucugaca

SEQ ID NO: 12722 - RNA, 21 nt, Artificial Sequence
  SAMD9 targeting guide sequence portion
cuuucaaagcugucagacaga

SEQ ID NO: 12723 - RNA, 21 nt, Artificial Sequence
  SAMD9 targeting guide sequence portion
gacuuaaacaucucugucuga

SEQ ID NO: 12724 - RNA, 21 nt, Artificial Sequence
  SAMD9 targeting guide sequence portion
gcagacuuaaacaucucuguc

SEQ ID NO: 12725 - RNA, 21 nt, Artificial Sequence
  SAMD9 targeting guide sequence portion
ucucugucugacagcuuugaa

SEQ ID NO: 12726 - RNA, 21 nt, Artificial Sequence
  SAMD9 targeting guide sequence portion
ucugucugacagcuuugaaag

SEQ ID NO: 12727 - RNA, 21 nt, Artificial Sequence
  SAMD9 targeting guide sequence portion
uuucaaagcugucagacagag

SEQ ID NO: 12728 - RNA, 22 nt, Artificial Sequence
  SAMD9 targeting guide sequence portion
aaacaucucugucugacagcuu

SEQ ID NO: 12729 - RNA, 22 nt, Artificial Sequence
  SAMD9 targeting guide sequence portion
aaagcugucagacagagauguu

SEQ ID NO: 12730 - RNA, 22 nt, Artificial Sequence
  SAMD9 targeting guide sequence portion
aacaucucugucugacagcuuu

SEQ ID NO: 12731 - RNA, 22 nt, Artificial Sequence
  SAMD9 targeting guide sequence portion
aagaaacuucugcagacuuaaa

SEQ ID NO: 12732 - RNA, 22 nt, Artificial Sequence
  SAMD9 targeting guide sequence portion
aagcugucagacagagauguuu

SEQ ID NO: 12733 - RNA, 22 nt, Artificial Sequence
  SAMD9 targeting guide sequence portion
acaucucugucugacagcuuug

SEQ ID NO: 12734 - RNA, 22 nt, Artificial Sequence
  SAMD9 targeting guide sequence portion
acuuaaacaucucugucugaca

SEQ ID NO: 12735 - RNA, 22 nt, Artificial Sequence
  SAMD9 targeting guide sequence portion
agacuuaaacaucucugucuga

SEQ ID NO: 12736 - RNA, 22 nt, Artificial Sequence
  SAMD9 targeting guide sequence portion
agauguuuaagucugcagaagu

SEQ ID NO: 12737 - RNA, 22 nt, Artificial Sequence
  SAMD9 targeting guide sequence portion
aucucugucugacagcuuugaa

SEQ ID NO: 12738 - RNA, 22 nt, Artificial Sequence
  SAMD9 targeting guide sequence portion
caaagcugucagacagagaugu

SEQ ID NO: 12739 - RNA, 22 nt, Artificial Sequence
  SAMD9 targeting guide sequence portion
caucucugucugacagcuuuga

SEQ ID NO: 12740 - RNA, 22 nt, Artificial Sequence
  SAMD9 targeting guide sequence portion
ccuuucaaagcugucagacaga

SEQ ID NO: 12741 - RNA, 22 nt, Artificial Sequence
  SAMD9 targeting guide sequence portion
cucugucugacagcuuugaaag

SEQ ID NO: 12742 - RNA, 22 nt, Artificial Sequence
  SAMD9 targeting guide sequence portion
cugucagacagagauguuuaag

SEQ ID NO: 12743 - RNA, 22 nt, Artificial Sequence
  SAMD9 targeting guide sequence portion
cuuaaacaucucugucugacag

SEQ ID NO: 12744 - RNA, 22 nt, Artificial Sequence
  SAMD9 targeting guide sequence portion
cuuucaaagcugucagacagag

SEQ ID NO: 12745 - RNA, 22 nt, Artificial Sequence
  SAMD9 targeting guide sequence portion
gaagaaacuucugcagacuuaa

SEQ ID NO: 12746 - RNA, 22 nt, Artificial Sequence
  SAMD9 targeting guide sequence portion
gacuuaaacaucucugucugac

SEQ ID NO: 12747 - RNA, 22 nt, Artificial Sequence
  SAMD9 targeting guide sequence portion
gagauguuuaagucugcagaag

SEQ ID NO: 12748 - RNA, 22 nt, Artificial Sequence
  SAMD9 targeting guide sequence portion
gcagacuuaaacaucucugucu

SEQ ID NO: 12749 - RNA, 22 nt, Artificial Sequence
  SAMD9 targeting guide sequence portion
gcugucagacagagauguuuaa

SEQ ID NO: 12750 - RNA, 22 nt, Artificial Sequence
  SAMD9 targeting guide sequence portion
uaaacaucucugucugacagcu

SEQ ID NO: 12751 - RNA, 22 nt, Artificial Sequence
  SAMD9 targeting guide sequence portion
ucaaagcugucagacagagaug

SEQ ID NO: 12752 - RNA, 22 nt, Artificial Sequence
  SAMD9 targeting guide sequence portion
ucucugucugacagcuuugaaa

SEQ ID NO: 12753 - RNA, 22 nt, Artificial Sequence
  SAMD9 targeting guide sequence portion
ucugucugacagcuuugaaagg

SEQ ID NO: 12754 - RNA, 22 nt, Artificial Sequence
  SAMD9 targeting guide sequence portion
ugcagacuuaaacaucucuguc

SEQ ID NO: 12755 - RNA, 22 nt, Artificial Sequence
  SAMD9 targeting guide sequence portion
uuucaaagcugucagacagaga

SEQ ID NO: 12756 - RNA, 20 nt, Artificial Sequence
  SAMD9 targeting guide sequence portion
aaaaaauuaaauggguacug

SEQ ID NO: 12757 - RNA, 20 nt, Artificial Sequence
  SAMD9 targeting guide sequence portion
aaaaaccucucaaacugagg

SEQ ID NO: 12758 - RNA, 20 nt, Artificial Sequence
  SAMD9 targeting guide sequence portion
aaaaaggaaggagugagaua

SEQ ID NO: 12759 - RNA, 20 nt, Artificial Sequence
  SAMD9 targeting guide sequence portion
aaaaauuaaauggguacuga

SEQ ID NO: 12760 - RNA, 20 nt, Artificial Sequence
  SAMD9 targeting guide sequence portion
aaaaccucucaaacugagga

SEQ ID NO: 12761 - RNA, 20 nt, Artificial Sequence
  SAMD9 targeting guide sequence portion
aaaaggaaggagugagauau

SEQ ID NO: 12762 - RNA, 20 nt, Artificial Sequence
  SAMD9 targeting guide sequence portion
aaaaguagcaaauauguucc

SEQ ID NO: 12763 - RNA, 20 nt, Artificial Sequence
  SAMD9 targeting guide sequence portion
aaaauaauaaggagcuauga

SEQ ID NO: 12764 - RNA, 20 nt, Artificial Sequence
  SAMD9 targeting guide sequence portion
aaaauauuucucaaagacag

SEQ ID NO: 12765 - RNA, 20 nt, Artificial Sequence
  SAMD9 targeting guide sequence portion
aaaauuaaauggguacugag

SEQ ID NO: 12766 - RNA, 20 nt, Artificial Sequence
  SAMD9 targeting guide sequence portion
aaacauguuaugaguucuac

SEQ ID NO: 12767 - RNA, 20 nt, Artificial Sequence
  SAMD9 targeting guide sequence portion
aaaccaaggaacauauuugc

SEQ ID NO: 12768 - RNA, 20 nt, Artificial Sequence
  SAMD9 targeting guide sequence portion
aaaccggcaagguuauagau

SEQ ID NO: 12769 - RNA, 20 nt, Artificial Sequence
  SAMD9 targeting guide sequence portion
aaaccucucaaacugaggag

SEQ ID NO: 12770 - RNA, 20 nt, Artificial Sequence
  SAMD9 targeting guide sequence portion
aaacugaggagcaacauuua

SEQ ID NO: 12771 - RNA, 20 nt, Artificial Sequence
  SAMD9 targeting guide sequence portion
aaagacaauagugaaaaagg

SEQ ID NO: 12772 - RNA, 20 nt, Artificial Sequence
  SAMD9 targeting guide sequence portion
aaagacagcaaaaaccucuc

SEQ ID NO: 12773 - RNA, 20 nt, Artificial Sequence
  SAMD9 targeting guide sequence portion
aaagcauagaucuugagucc

SEQ ID NO: 12774 - RNA, 20 nt, Artificial Sequence
  SAMD9 targeting guide sequence portion
aaaggaaggagugagauaua

SEQ ID NO: 12775 - RNA, 20 nt, Artificial Sequence
  SAMD9 targeting guide sequence portion
aaaguagcaaauauguuccu

SEQ ID NO: 12776 - RNA, 20 nt, Artificial Sequence
  SAMD9 targeting guide sequence portion
aaauaauaaggagcuaugac

SEQ ID NO: 12777 - RNA, 20 nt, Artificial Sequence
  SAMD9 targeting guide sequence portion
aaauacugcauguacagauc

SEQ ID NO: 12778 - RNA, 20 nt, Artificial Sequence
  SAMD9 targeting guide sequence portion
aaauauguuccuugguuugg

SEQ ID NO: 12779 - RNA, 20 nt, Artificial Sequence
  SAMD9 targeting guide sequence portion
aaauauuucucaaagacagc

SEQ ID NO: 12780 - RNA, 20 nt, Artificial Sequence
  SAMD9 targeting guide sequence portion
aaauauuuucccagacauuc

SEQ ID NO: 12781 - RNA, 20 nt, Artificial Sequence
  SAMD9 targeting guide sequence portion
aaaugccauuugaguagaca

SEQ ID NO: 12782 - RNA, 20 nt, Artificial Sequence
  SAMD9 targeting guide sequence portion
aaauggcauuuagacauuag

SEQ ID NO: 12783 - RNA, 20 nt, Artificial Sequence
  SAMD9 targeting guide sequence portion
aaauggguacugagaucaaa

SEQ ID NO: 12784 - RNA, 20 nt, Artificial Sequence
  SAMD9 targeting guide sequence portion
aaauguugcuccucaguuug

SEQ ID NO: 12785 - RNA, 20 nt, Artificial Sequence
  SAMD9 targeting guide sequence portion
aaauuaaauacugcauguac

SEQ ID NO: 12786 - RNA, 20 nt, Artificial Sequence
  SAMD9 targeting guide sequence portion
aaauuaaauggguacugaga

SEQ ID NO: 12787 - RNA, 20 nt, Artificial Sequence
  SAMD9 targeting guide sequence portion
aaauucuuggaggaagaaua

SEQ ID NO: 12788 - RNA, 20 nt, Artificial Sequence
  SAMD9 targeting guide sequence portion
aacauauuugcuacuuuuca

SEQ ID NO: 12789 - RNA, 20 nt, Artificial Sequence
  SAMD9 targeting guide sequence portion
aacaucauugaugacaaaau

SEQ ID NO: 12790 - RNA, 20 nt, Artificial Sequence
  SAMD9 targeting guide sequence portion
aacauguuaugaguucuaca

SEQ ID NO: 12791 - RNA, 20 nt, Artificial Sequence
  SAMD9 targeting guide sequence portion
aacauguuuaagaggaaauu

SEQ ID NO: 12792 - RNA, 20 nt, Artificial Sequence
  SAMD9 targeting guide sequence portion
aacauuuauucuuacuaagc

SEQ ID NO: 12793 - RNA, 20 nt, Artificial Sequence
  SAMD9 targeting guide sequence portion
aaccaaaccaaggaacauau

SEQ ID NO: 12794 - RNA, 20 nt, Artificial Sequence
  SAMD9 targeting guide sequence portion
aaccaaggaacauauuugcu

SEQ ID NO: 12795 - RNA, 20 nt, Artificial Sequence
  SAMD9 targeting guide sequence portion
aaccccacuacuuaccaggc

SEQ ID NO: 12796 - RNA, 20 nt, Artificial Sequence
  SAMD9 targeting guide sequence portion
aaccggcaagguuauagaua

SEQ ID NO: 12797 - RNA, 20 nt, Artificial Sequence
  SAMD9 targeting guide sequence portion
aaccucucaaacugaggagc

SEQ ID NO: 12798 - RNA, 20 nt, Artificial Sequence
  SAMD9 targeting guide sequence portion
aaccuugccgguuuaaagca

SEQ ID NO: 12799 - RNA, 20 nt, Artificial Sequence
  SAMD9 targeting guide sequence portion
aacucauaacauguuuaaga

SEQ ID NO: 12800 - RNA, 20 nt, Artificial Sequence
  SAMD9 targeting guide sequence portion
aacugaggagcaacauuuau

SEQ ID NO: 12801 - RNA, 20 nt, Artificial Sequence
  SAMD9 targeting guide sequence portion
aacuucuccugacuccaguc

SEQ ID NO: 12802 - RNA, 20 nt, Artificial Sequence
  SAMD9 targeting guide sequence portion
aagaagauugucuacucaaa

SEQ ID NO: 12803 - RNA, 20 nt, Artificial Sequence
  SAMD9 targeting guide sequence portion
aagaauaaauguugcuccuc

SEQ ID NO: 12804 - RNA, 20 nt, Artificial Sequence
  SAMD9 targeting guide sequence portion
aagaauuugaucucaguacc

SEQ ID NO: 12805 - RNA, 20 nt, Artificial Sequence
  SAMD9 targeting guide sequence portion
aagacaauagugaaaaagga

SEQ ID NO: 12806 - RNA, 20 nt, Artificial Sequence
  SAMD9 targeting guide sequence portion
aagacagcaaaaaccucuca

SEQ ID NO: 12807 - RNA, 20 nt, Artificial Sequence
  SAMD9 targeting guide sequence portion
aagagcuagaggcuguaucu

SEQ ID NO: 12808 - RNA, 20 nt, Artificial Sequence
  SAMD9 targeting guide sequence portion
aagaggaaauuaaauacugc

SEQ ID NO: 12809 - RNA, 20 nt, Artificial Sequence
  SAMD9 targeting guide sequence portion
aagauccuugagugccaagc

SEQ ID NO: 12810 - RNA, 20 nt, Artificial Sequence
  SAMD9 targeting guide sequence portion
aagaucuaugcuuuaaaccg

SEQ ID NO: 12811 - RNA, 20 nt, Artificial Sequence
  SAMD9 targeting guide sequence portion
aagauugucuacucaaaugg

SEQ ID NO: 12812 - RNA, 20 nt, Artificial Sequence
  SAMD9 targeting guide sequence portion
aagcacaugauacauugaug

SEQ ID NO: 12813 - RNA, 20 nt, Artificial Sequence
  SAMD9 targeting guide sequence portion
aagcagaucaucaauguauc

SEQ ID NO: 12814 - RNA, 20 nt, Artificial Sequence
  SAMD9 targeting guide sequence portion
aagcuggcuacacagaaccc

SEQ ID NO: 12815 - RNA, 20 nt, Artificial Sequence
  SAMD9 targeting guide sequence portion
aaggaacauauuugcuacuu

SEQ ID NO: 12816 - RNA, 20 nt, Artificial Sequence
  SAMD9 targeting guide sequence portion
aaggaaggagugagauauau

SEQ ID NO: 12817 - RNA, 20 nt, Artificial Sequence
  SAMD9 targeting guide sequence portion
aaggagcuaugacuggaguc

SEQ ID NO: 12818 - RNA, 20 nt, Artificial Sequence
  SAMD9 targeting guide sequence portion
aaggagugagauauaugaaa

SEQ ID NO: 12819 - RNA, 20 nt, Artificial Sequence
  SAMD9 targeting guide sequence portion
aagguuauagauacagccuc

SEQ ID NO: 12820 - RNA, 20 nt, Artificial Sequence
  SAMD9 targeting guide sequence portion
aaguagcaaauauguuccuu

SEQ ID NO: 12821 - RNA, 20 nt, Artificial Sequence
  SAMD9 targeting guide sequence portion
aaguagugggguucugugua

SEQ ID NO: 12822 - RNA, 20 nt, Artificial Sequence
  SAMD9 targeting guide sequence portion
aaguuaguguaauaagcugg

SEQ ID NO: 12823 - RNA, 20 nt, Artificial Sequence
  SAMD9 targeting guide sequence portion
aauaaauguugcuccucagu

SEQ ID NO: 12824 - RNA, 20 nt, Artificial Sequence
  SAMD9 targeting guide sequence portion
aauaagcuggcuacacagaa

SEQ ID NO: 12825 - RNA, 20 nt, Artificial Sequence
  SAMD9 targeting guide sequence portion
aauaaggagcuaugacugga

SEQ ID NO: 12826 - RNA, 20 nt, Artificial Sequence
  SAMD9 targeting guide sequence portion
aauaauaaggagcuaugacu

SEQ ID NO: 12827 - RNA, 20 nt, Artificial Sequence
  SAMD9 targeting guide sequence portion
aauacugcauguacagaucu

SEQ ID NO: 12828 - RNA, 20 nt, Artificial Sequence
  SAMD9 targeting guide sequence portion
aauagugaaaaaggaaggag

SEQ ID NO: 12829 - RNA, 20 nt, Artificial Sequence
  SAMD9 targeting guide sequence portion
aauauguuccuugguuuggu

SEQ ID NO: 12830 - RNA, 20 nt, Artificial Sequence
  SAMD9 targeting guide sequence portion
aauauuucucaaagacagca

SEQ ID NO: 12831 - RNA, 20 nt, Artificial Sequence
  SAMD9 targeting guide sequence portion
aauauuuucccagacauucu

SEQ ID NO: 12832 - RNA, 20 nt, Artificial Sequence
  SAMD9 targeting guide sequence portion
aauccaugccugguaaguag

SEQ ID NO: 12833 - RNA, 20 nt, Artificial Sequence
  SAMD9 targeting guide sequence portion
aaucuucuucaauccaugcc

SEQ ID NO: 12834 - RNA, 20 nt, Artificial Sequence
  SAMD9 targeting guide sequence portion
aaugauguuaaccaaaccaa

SEQ ID NO: 12835 - RNA, 20 nt, Artificial Sequence
  SAMD9 targeting guide sequence portion
aaugccauuugaguagacaa

SEQ ID NO: 12836 - RNA, 20 nt, Artificial Sequence
  SAMD9 targeting guide sequence portion
aauggcauuuagacauuaga

SEQ ID NO: 12837 - RNA, 20 nt, Artificial Sequence
  SAMD9 targeting guide sequence portion
aauggguacugagaucaaau

SEQ ID NO: 12838 - RNA, 20 nt, Artificial Sequence
  SAMD9 targeting guide sequence portion
aauguaucaugugcuuggca

SEQ ID NO: 12839 - RNA, 20 nt, Artificial Sequence
  SAMD9 targeting guide sequence portion
aaugucuaaaugccauuuga

SEQ ID NO: 12840 - RNA, 20 nt, Artificial Sequence
  SAMD9 targeting guide sequence portion
aaugucugggaaaauauuuc

SEQ ID NO: 12841 - RNA, 20 nt, Artificial Sequence
  SAMD9 targeting guide sequence portion
aauguugcuccucaguuuga

SEQ ID NO: 12842 - RNA, 20 nt, Artificial Sequence
  SAMD9 targeting guide sequence portion
aauuaaauacugcauguaca

SEQ ID NO: 12843 - RNA, 20 nt, Artificial Sequence
  SAMD9 targeting guide sequence portion
aauuaaauggguacugagau

SEQ ID NO: 12844 - RNA, 20 nt, Artificial Sequence
  SAMD9 targeting guide sequence portion
aauucuuggaggaagaauau

SEQ ID NO: 12845 - RNA, 20 nt, Artificial Sequence
  SAMD9 targeting guide sequence portion
aauuuccucuuaaacauguu

SEQ ID NO: 12846 - RNA, 20 nt, Artificial Sequence
  SAMD9 targeting guide sequence portion
aauuugaucucaguacccau

SEQ ID NO: 12847 - RNA, 20 nt, Artificial Sequence
  SAMD9 targeting guide sequence portion
acaaaauaauaaggagcuau

SEQ ID NO: 12848 - RNA, 20 nt, Artificial Sequence
  SAMD9 targeting guide sequence portion
acaaagacaauagugaaaaa

SEQ ID NO: 12849 - RNA, 20 nt, Artificial Sequence
  SAMD9 targeting guide sequence portion
acaauagugaaaaaggaagg

SEQ ID NO: 12850 - RNA, 20 nt, Artificial Sequence
  SAMD9 targeting guide sequence portion
acaaucuucuucaauccaug

SEQ ID NO: 12851 - RNA, 20 nt, Artificial Sequence
  SAMD9 targeting guide sequence portion
acacagaaccccacuacuua

SEQ ID NO: 12852 - RNA, 20 nt, Artificial Sequence
  SAMD9 targeting guide sequence portion
acacuaacuucuccugacuc

SEQ ID NO: 12853 - RNA, 20 nt, Artificial Sequence
  SAMD9 targeting guide sequence portion
acagaaccccacuacuuacc

SEQ ID NO: 12854 - RNA, 20 nt, Artificial Sequence
  SAMD9 targeting guide sequence portion
acagaucugaagagcuagag

SEQ ID NO: 12855 - RNA, 20 nt, Artificial Sequence
  SAMD9 targeting guide sequence portion
acagcaaaaaccucucaaac

SEQ ID NO: 12856 - RNA, 20 nt, Artificial Sequence
  SAMD9 targeting guide sequence portion
acagccucuagcucuucaga

SEQ ID NO: 12857 - RNA, 20 nt, Artificial Sequence
  SAMD9 targeting guide sequence portion
acauauuugcuacuuuucau

SEQ ID NO: 12858 - RNA, 20 nt, Artificial Sequence
  SAMD9 targeting guide sequence portion
acaucauugaugacaaaaua

SEQ ID NO: 12859 - RNA, 20 nt, Artificial Sequence
  SAMD9 targeting guide sequence portion
acaugauacauugaugaucu

SEQ ID NO: 12860 - RNA, 20 nt, Artificial Sequence
  SAMD9 targeting guide sequence portion
acaugcaguauuuaauuucc

SEQ ID NO: 12861 - RNA, 20 nt, Artificial Sequence
  SAMD9 targeting guide sequence portion
acauguuaugaguucuacaa

SEQ ID NO: 12862 - RNA, 20 nt, Artificial Sequence
  SAMD9 targeting guide sequence portion
acauguuuaagaggaaauua

SEQ ID NO: 12863 - RNA, 20 nt, Artificial Sequence
  SAMD9 targeting guide sequence portion
acauuagaaugucugggaaa

SEQ ID NO: 12864 - RNA, 20 nt, Artificial Sequence
  SAMD9 targeting guide sequence portion
acauucuaaugucuaaaugc

SEQ ID NO: 12865 - RNA, 20 nt, Artificial Sequence
  SAMD9 targeting guide sequence portion
acauugaugaucugcuuagu

SEQ ID NO: 12866 - RNA, 20 nt, Artificial Sequence
  SAMD9 targeting guide sequence portion
acauuuauucuuacuaagca

SEQ ID NO: 12867 - RNA, 20 nt, Artificial Sequence
  SAMD9 targeting guide sequence portion
accaaaccaaggaacauauu

SEQ ID NO: 12868 - RNA, 20 nt, Artificial Sequence
  SAMD9 targeting guide sequence portion
accaaggaacauauuugcua

SEQ ID NO: 12869 - RNA, 20 nt, Artificial Sequence
  SAMD9 targeting guide sequence portion
accaggcauggauugaagaa

SEQ ID NO: 12870 - RNA, 20 nt, Artificial Sequence
  SAMD9 targeting guide sequence portion
accccacuacuuaccaggca

SEQ ID NO: 12871 - RNA, 20 nt, Artificial Sequence
  SAMD9 targeting guide sequence portion
accggcaagguuauagauac

SEQ ID NO: 12872 - RNA, 20 nt, Artificial Sequence
  SAMD9 targeting guide sequence portion
accucucaaacugaggagca

SEQ ID NO: 12873 - RNA, 20 nt, Artificial Sequence
  SAMD9 targeting guide sequence portion
accuugccgguuuaaagcau

SEQ ID NO: 12874 - RNA, 20 nt, Artificial Sequence
  SAMD9 targeting guide sequence portion
acuaacuucuccugacucca

SEQ ID NO: 12875 - RNA, 20 nt, Artificial Sequence
  SAMD9 targeting guide sequence portion
acuaagcagaucaucaaugu

SEQ ID NO: 12876 - RNA, 20 nt, Artificial Sequence
  SAMD9 targeting guide sequence portion
acuacuuaccaggcauggau

SEQ ID NO: 12877 - RNA, 20 nt, Artificial Sequence
  SAMD9 targeting guide sequence portion
acuauugucuuuguagaacu

SEQ ID NO: 12878 - RNA, 20 nt, Artificial Sequence
  SAMD9 targeting guide sequence portion
acucaaauggcauuuagaca

SEQ ID NO: 12879 - RNA, 20 nt, Artificial Sequence
  SAMD9 targeting guide sequence portion
acucaagaucuaugcuuuaa

SEQ ID NO: 12880 - RNA, 20 nt, Artificial Sequence
  SAMD9 targeting guide sequence portion
acucaaggaucuuccaaaac

SEQ ID NO: 12881 - RNA, 20 nt, Artificial Sequence
  SAMD9 targeting guide sequence portion
acucauaacauguuuaagag

SEQ ID NO: 12882 - RNA, 20 nt, Artificial Sequence
  SAMD9 targeting guide sequence portion
acuccagucauagcuccuua

SEQ ID NO: 12883 - RNA, 20 nt, Artificial Sequence
  SAMD9 targeting guide sequence portion
acuccuuccuuuuucacuau

SEQ ID NO: 12884 - RNA, 20 nt, Artificial Sequence
  SAMD9 targeting guide sequence portion
acugagaucaaauucuugga

SEQ ID NO: 12885 - RNA, 20 nt, Artificial Sequence
  SAMD9 targeting guide sequence portion
acugaggagcaacauuuauu

SEQ ID NO: 12886 - RNA, 20 nt, Artificial Sequence
  SAMD9 targeting guide sequence portion
acugcauguacagaucugaa

SEQ ID NO: 12887 - RNA, 20 nt, Artificial Sequence
  SAMD9 targeting guide sequence portion
acuggagucaggagaaguua

SEQ ID NO: 12888 - RNA, 20 nt, Artificial Sequence
  SAMD9 targeting guide sequence portion
acuuaccaggcauggauuga

SEQ ID NO: 12889 - RNA, 20 nt, Artificial Sequence
  SAMD9 targeting guide sequence portion
acuucuccugacuccaguca

SEQ ID NO: 12890 - RNA, 20 nt, Artificial Sequence
  SAMD9 targeting guide sequence portion
acuuuucauauaucucacuc

SEQ ID NO: 12891 - RNA, 20 nt, Artificial Sequence
  SAMD9 targeting guide sequence portion
agaaauauuuucccagacau

SEQ ID NO: 12892 - RNA, 20 nt, Artificial Sequence
  SAMD9 targeting guide sequence portion
agaaccccacuacuuaccag

SEQ ID NO: 12893 - RNA, 20 nt, Artificial Sequence
  SAMD9 targeting guide sequence portion
agaacucauaacauguuuaa

SEQ ID NO: 12894 - RNA, 20 nt, Artificial Sequence
  SAMD9 targeting guide sequence portion
agaagauugucuacucaaau

SEQ ID NO: 12895 - RNA, 20 nt, Artificial Sequence
  SAMD9 targeting guide sequence portion
agaaguuaguguaauaagcu

SEQ ID NO: 12896 - RNA, 20 nt, Artificial Sequence
  SAMD9 targeting guide sequence portion
agaauaaauguugcuccuca

SEQ ID NO: 12897 - RNA, 20 nt, Artificial Sequence
  SAMD9 targeting guide sequence portion
agaaugucugggaaaauauu

SEQ ID NO: 12898 - RNA, 20 nt, Artificial Sequence
  SAMD9 targeting guide sequence portion
agaauuugaucucaguaccc

SEQ ID NO: 12899 - RNA, 20 nt, Artificial Sequence
  SAMD9 targeting guide sequence portion
agacaauagugaaaaaggaa

SEQ ID NO: 12900 - RNA, 20 nt, Artificial Sequence
  SAMD9 targeting guide sequence portion
agacaaucuucuucaaucca

SEQ ID NO: 12901 - RNA, 20 nt, Artificial Sequence
  SAMD9 targeting guide sequence portion
agacagcaaaaaccucucaa

SEQ ID NO: 12902 - RNA, 20 nt, Artificial Sequence
  SAMD9 targeting guide sequence portion
agacauuagaaugucuggga

SEQ ID NO: 12903 - RNA, 20 nt, Artificial Sequence
  SAMD9 targeting guide sequence portion
agacauucuaaugucuaaau

SEQ ID NO: 12904 - RNA, 20 nt, Artificial Sequence
  SAMD9 targeting guide sequence portion
agagcuagaggcuguaucua

SEQ ID NO: 12905 - RNA, 20 nt, Artificial Sequence
  SAMD9 targeting guide sequence portion
agaggaaauuaaauacugca

SEQ ID NO: 12906 - RNA, 20 nt, Artificial Sequence
  SAMD9 targeting guide sequence portion
agaggcuguaucuauaaccu

SEQ ID NO: 12907 - RNA, 20 nt, Artificial Sequence
  SAMD9 targeting guide sequence portion
agagguuuuugcugucuuug

SEQ ID NO: 12908 - RNA, 20 nt, Artificial Sequence
  SAMD9 targeting guide sequence portion
agauacagccucuagcucuu

SEQ ID NO: 12909 - RNA, 20 nt, Artificial Sequence
  SAMD9 targeting guide sequence portion
agauauaugaaaaguagcaa

SEQ ID NO: 12910 - RNA, 20 nt, Artificial Sequence
  SAMD9 targeting guide sequence portion
agaucaaauucuuggaggaa

SEQ ID NO: 12911 - RNA, 20 nt, Artificial Sequence
  SAMD9 targeting guide sequence portion
agaucaucaauguaucaugu

SEQ ID NO: 12912 - RNA, 20 nt, Artificial Sequence
  SAMD9 targeting guide sequence portion
agauccuugagugccaagca

SEQ ID NO: 12913 - RNA, 20 nt, Artificial Sequence
  SAMD9 targeting guide sequence portion
agaucuaugcuuuaaaccgg

SEQ ID NO: 12914 - RNA, 20 nt, Artificial Sequence
  SAMD9 targeting guide sequence portion
agaucugaagagcuagaggc

SEQ ID NO: 12915 - RNA, 20 nt, Artificial Sequence
  SAMD9 targeting guide sequence portion
agaucuguacaugcaguauu

SEQ ID NO: 12916 - RNA, 20 nt, Artificial Sequence
  SAMD9 targeting guide sequence portion
agauugucuacucaaauggc

SEQ ID NO: 12917 - RNA, 20 nt, Artificial Sequence
  SAMD9 targeting guide sequence portion
agcaaaaaccucucaaacug

SEQ ID NO: 12918 - RNA, 20 nt, Artificial Sequence
  SAMD9 targeting guide sequence portion
agcaaauauguuccuugguu

SEQ ID NO: 12919 - RNA, 20 nt, Artificial Sequence
  SAMD9 targeting guide sequence portion
agcaacauuuauucuuacua

SEQ ID NO: 12920 - RNA, 20 nt, Artificial Sequence
  SAMD9 targeting guide sequence portion
agcacaugauacauugauga

SEQ ID NO: 12921 - RNA, 20 nt, Artificial Sequence
  SAMD9 targeting guide sequence portion
agcagaucaucaauguauca

SEQ ID NO: 12922 - RNA, 20 nt, Artificial Sequence
  SAMD9 targeting guide sequence portion
agccagcuuauuacacuaac

SEQ ID NO: 12923 - RNA, 20 nt, Artificial Sequence
  SAMD9 targeting guide sequence portion
agccucuagcucuucagauc

SEQ ID NO: 12924 - RNA, 20 nt, Artificial Sequence
  SAMD9 targeting guide sequence portion
agccugauauucuuccucca

SEQ ID NO: 12925 - RNA, 20 nt, Artificial Sequence
  SAMD9 targeting guide sequence portion
agcuagaggcuguaucuaua

SEQ ID NO: 12926 - RNA, 20 nt, Artificial Sequence
  SAMD9 targeting guide sequence portion
agcuaugacuggagucagga

SEQ ID NO: 12927 - RNA, 20 nt, Artificial Sequence
  SAMD9 targeting guide sequence portion
agcuccuuauuauuuuguca

SEQ ID NO: 12928 - RNA, 20 nt, Artificial Sequence
  SAMD9 targeting guide sequence portion
agcucuucagaucuguacau

SEQ ID NO: 12929 - RNA, 20 nt, Artificial Sequence
  SAMD9 targeting guide sequence portion
agcuggcuacacagaacccc

SEQ ID NO: 12930 - RNA, 20 nt, Artificial Sequence
  SAMD9 targeting guide sequence portion
agcuuauuacacuaacuucu

SEQ ID NO: 12931 - RNA, 20 nt, Artificial Sequence
  SAMD9 targeting guide sequence portion
aggaaauuaaauacugcaug

SEQ ID NO: 12932 - RNA, 20 nt, Artificial Sequence
  SAMD9 targeting guide sequence portion
aggaacauauuugcuacuuu

SEQ ID NO: 12933 - RNA, 20 nt, Artificial Sequence
  SAMD9 targeting guide sequence portion
aggaaggagugagauauaug

SEQ ID NO: 12934 - RNA, 20 nt, Artificial Sequence
  SAMD9 targeting guide sequence portion
aggagaaguuaguguaauaa

SEQ ID NO: 12935 - RNA, 20 nt, Artificial Sequence
  SAMD9 targeting guide sequence portion
aggagcaacauuuauucuua

SEQ ID NO: 12936 - RNA, 20 nt, Artificial Sequence
  SAMD9 targeting guide sequence portion
aggagcuaugacuggaguca

SEQ ID NO: 12937 - RNA, 20 nt, Artificial Sequence
  SAMD9 targeting guide sequence portion
aggagugagauauaugaaaa

SEQ ID NO: 12938 - RNA, 20 nt, Artificial Sequence
  SAMD9 targeting guide sequence portion
aggcauggauugaagaagau

SEQ ID NO: 12939 - RNA, 20 nt, Artificial Sequence
  SAMD9 targeting guide sequence portion
aggcuguaucuauaaccuug

SEQ ID NO: 12940 - RNA, 20 nt, Artificial Sequence
  SAMD9 targeting guide sequence portion
agguuauagauacagccucu

SEQ ID NO: 12941 - RNA, 20 nt, Artificial Sequence
  SAMD9 targeting guide sequence portion
agguuuuugcugucuuugag

SEQ ID NO: 12942 - RNA, 20 nt, Artificial Sequence
  SAMD9 targeting guide sequence portion
aguaagaauaaauguugcuc

SEQ ID NO: 12943 - RNA, 20 nt, Artificial Sequence
  SAMD9 targeting guide sequence portion
aguagacaaucuucuucaau

SEQ ID NO: 12944 - RNA, 20 nt, Artificial Sequence
  SAMD9 targeting guide sequence portion
aguagcaaauauguuccuug

SEQ ID NO: 12945 - RNA, 20 nt, Artificial Sequence
  SAMD9 targeting guide sequence portion
aguagugggguucuguguag

SEQ ID NO: 12946 - RNA, 20 nt, Artificial Sequence
  SAMD9 targeting guide sequence portion
aguauuuaauuuccucuuaa

SEQ ID NO: 12947 - RNA, 20 nt, Artificial Sequence
  SAMD9 targeting guide sequence portion
agucaggagaaguuagugua

SEQ ID NO: 12948 - RNA, 20 nt, Artificial Sequence
  SAMD9 targeting guide sequence portion
agucauagcuccuuauuauu

SEQ ID NO: 12949 - RNA, 20 nt, Artificial Sequence
  SAMD9 targeting guide sequence portion
agugaaaaaggaaggaguga

SEQ ID NO: 12950 - RNA, 20 nt, Artificial Sequence
  SAMD9 targeting guide sequence portion
agugagauauaugaaaagua

SEQ ID NO: 12951 - RNA, 20 nt, Artificial Sequence
  SAMD9 targeting guide sequence portion
agugccaagcacaugauaca

SEQ ID NO: 12952 - RNA, 20 nt, Artificial Sequence
  SAMD9 targeting guide sequence portion
agugggguucuguguagcca

SEQ ID NO: 12953 - RNA, 20 nt, Artificial Sequence
  SAMD9 targeting guide sequence portion
aguguaauaagcuggcuaca

SEQ ID NO: 12954 - RNA, 20 nt, Artificial Sequence
  SAMD9 targeting guide sequence portion
aguuaguguaauaagcuggc

SEQ ID NO: 12955 - RNA, 20 nt, Artificial Sequence
  SAMD9 targeting guide sequence portion
aguucuacaaagacaauagu

SEQ ID NO: 12956 - RNA, 20 nt, Artificial Sequence
  SAMD9 targeting guide sequence portion
aguuugagagguuuuugcug

SEQ ID NO: 12957 - RNA, 20 nt, Artificial Sequence
  SAMD9 targeting guide sequence portion
auaaauguugcuccucaguu

SEQ ID NO: 12958 - RNA, 20 nt, Artificial Sequence
  SAMD9 targeting guide sequence portion
auaaccuugccgguuuaaag

SEQ ID NO: 12959 - RNA, 20 nt, Artificial Sequence
  SAMD9 targeting guide sequence portion
auaagcuggcuacacagaac

SEQ ID NO: 12960 - RNA, 20 nt, Artificial Sequence
  SAMD9 targeting guide sequence portion
auaaggagcuaugacuggag

SEQ ID NO: 12961 - RNA, 20 nt, Artificial Sequence
  SAMD9 targeting guide sequence portion
auaauaaggagcuaugacug

SEQ ID NO: 12962 - RNA, 20 nt, Artificial Sequence
  SAMD9 targeting guide sequence portion
auacagccucuagcucuuca

SEQ ID NO: 12963 - RNA, 20 nt, Artificial Sequence
  SAMD9 targeting guide sequence portion
auacauugaugaucugcuua

SEQ ID NO: 12964 - RNA, 20 nt, Artificial Sequence
  SAMD9 targeting guide sequence portion
auacugcauguacagaucug

SEQ ID NO: 12965 - RNA, 20 nt, Artificial Sequence
  SAMD9 targeting guide sequence portion
auagauacagccucuagcuc

SEQ ID NO: 12966 - RNA, 20 nt, Artificial Sequence
  SAMD9 targeting guide sequence portion
auagcuccuuauuauuuugu

SEQ ID NO: 12967 - RNA, 20 nt, Artificial Sequence
  SAMD9 targeting guide sequence portion
auagugaaaaaggaaggagu

SEQ ID NO: 12968 - RNA, 20 nt, Artificial Sequence
  SAMD9 targeting guide sequence portion
auauaucucacuccuuccuu

SEQ ID NO: 12969 - RNA, 20 nt, Artificial Sequence
  SAMD9 targeting guide sequence portion
auauaugaaaaguagcaaau

SEQ ID NO: 12970 - RNA, 20 nt, Artificial Sequence
  SAMD9 targeting guide sequence portion
auaucucacuccuuccuuuu

SEQ ID NO: 12971 - RNA, 20 nt, Artificial Sequence
  SAMD9 targeting guide sequence portion
auaugaaaaguagcaaauau

SEQ ID NO: 12972 - RNA, 20 nt, Artificial Sequence
  SAMD9 targeting guide sequence portion
auauguuccuugguuugguu

SEQ ID NO: 12973 - RNA, 20 nt, Artificial Sequence
  SAMD9 targeting guide sequence portion
auauucuuccuccaagaauu

SEQ ID NO: 12974 - RNA, 20 nt, Artificial Sequence
  SAMD9 targeting guide sequence portion
auauuucucaaagacagcaa

SEQ ID NO: 12975 - RNA, 20 nt, Artificial Sequence
  SAMD9 targeting guide sequence portion
auauuugcuacuuuucauau

SEQ ID NO: 12976 - RNA, 20 nt, Artificial Sequence
  SAMD9 targeting guide sequence portion
auauuuucccagacauucua

SEQ ID NO: 12977 - RNA, 20 nt, Artificial Sequence
  SAMD9 targeting guide sequence portion
aucaaauucuuggaggaaga

SEQ ID NO: 12978 - RNA, 20 nt, Artificial Sequence
  SAMD9 targeting guide sequence portion
aucaaugauguuaaccaaac

SEQ ID NO: 12979 - RNA, 20 nt, Artificial Sequence
  SAMD9 targeting guide sequence portion
aucaauguaucaugugcuug

SEQ ID NO: 12980 - RNA, 20 nt, Artificial Sequence
  SAMD9 targeting guide sequence portion
aucaucaauguaucaugugc

SEQ ID NO: 12981 - RNA, 20 nt, Artificial Sequence
  SAMD9 targeting guide sequence portion
aucaugugcuuggcacucaa

SEQ ID NO: 12982 - RNA, 20 nt, Artificial Sequence
  SAMD9 targeting guide sequence portion
aucauugaugacaaaauaau

SEQ ID NO: 12983 - RNA, 20 nt, Artificial Sequence
  SAMD9 targeting guide sequence portion
auccaugccugguaaguagu

SEQ ID NO: 12984 - RNA, 20 nt, Artificial Sequence
  SAMD9 targeting guide sequence portion
auccuugagugccaagcaca

SEQ ID NO: 12985 - RNA, 20 nt, Artificial Sequence
  SAMD9 targeting guide sequence portion
aucuauaaccuugccgguuu

SEQ ID NO: 12986 - RNA, 20 nt, Artificial Sequence
  SAMD9 targeting guide sequence portion
aucuaugcuuuaaaccggca

SEQ ID NO: 12987 - RNA, 20 nt, Artificial Sequence
  SAMD9 targeting guide sequence portion
aucucacuccuuccuuuuuc

SEQ ID NO: 12988 - RNA, 20 nt, Artificial Sequence
  SAMD9 targeting guide sequence portion
aucugaagagcuagaggcug

SEQ ID NO: 12989 - RNA, 20 nt, Artificial Sequence
  SAMD9 targeting guide sequence portion
aucugcuuaguaagaauaaa

SEQ ID NO: 12990 - RNA, 20 nt, Artificial Sequence
  SAMD9 targeting guide sequence portion
aucuguacaugcaguauuua

SEQ ID NO: 12991 - RNA, 20 nt, Artificial Sequence
  SAMD9 targeting guide sequence portion
aucuucuucaauccaugccu

SEQ ID NO: 12992 - RNA, 20 nt, Artificial Sequence
  SAMD9 targeting guide sequence portion
augaaaaguagcaaauaugu

SEQ ID NO: 12993 - RNA, 20 nt, Artificial Sequence
  SAMD9 targeting guide sequence portion
augacaaaauaauaaggagc

SEQ ID NO: 12994 - RNA, 20 nt, Artificial Sequence
  SAMD9 targeting guide sequence portion
augacuggagucaggagaag

SEQ ID NO: 12995 - RNA, 20 nt, Artificial Sequence
  SAMD9 targeting guide sequence portion
augaguucuacaaagacaau

SEQ ID NO: 12996 - RNA, 20 nt, Artificial Sequence
  SAMD9 targeting guide sequence portion
augauacauugaugaucugc

SEQ ID NO: 12997 - RNA, 20 nt, Artificial Sequence
  SAMD9 targeting guide sequence portion
augaucugcuuaguaagaau

SEQ ID NO: 12998 - RNA, 20 nt, Artificial Sequence
  SAMD9 targeting guide sequence portion
augauguuaaccaaaccaag

SEQ ID NO: 12999 - RNA, 20 nt, Artificial Sequence
  SAMD9 targeting guide sequence portion
augcaguauuuaauuuccuc

SEQ ID NO: 13000 - RNA, 20 nt, Artificial Sequence
  SAMD9 targeting guide sequence portion
augccauuugaguagacaau

SEQ ID NO: 13001 - RNA, 20 nt, Artificial Sequence
  SAMD9 targeting guide sequence portion
augccugguaaguagugggg

SEQ ID NO: 13002 - RNA, 20 nt, Artificial Sequence
  SAMD9 targeting guide sequence portion
augcuuuaaaccggcaaggu

SEQ ID NO: 13003 - RNA, 20 nt, Artificial Sequence
  SAMD9 targeting guide sequence portion
auggauugaagaagauuguc

SEQ ID NO: 13004 - RNA, 20 nt, Artificial Sequence
  SAMD9 targeting guide sequence portion
auggcauuuagacauuagaa

SEQ ID NO: 13005 - RNA, 20 nt, Artificial Sequence
  SAMD9 targeting guide sequence portion
auggguacugagaucaaauu

SEQ ID NO: 13006 - RNA, 20 nt, Artificial Sequence
  SAMD9 targeting guide sequence portion
auguacagaucugaagagcu

SEQ ID NO: 13007 - RNA, 20 nt, Artificial Sequence
  SAMD9 targeting guide sequence portion
auguaucaugugcuuggcac

SEQ ID NO: 13008 - RNA, 20 nt, Artificial Sequence
  SAMD9 targeting guide sequence portion
augucuaaaugccauuugag

SEQ ID NO: 13009 - RNA, 20 nt, Artificial Sequence
  SAMD9 targeting guide sequence portion
augucugggaaaauauuucu

SEQ ID NO: 13010 - RNA, 20 nt, Artificial Sequence
  SAMD9 targeting guide sequence portion
augugcuuggcacucaagga

SEQ ID NO: 13011 - RNA, 20 nt, Artificial Sequence
  SAMD9 targeting guide sequence portion
auguuaaccaaaccaaggaa

SEQ ID NO: 13012 - RNA, 20 nt, Artificial Sequence
  SAMD9 targeting guide sequence portion
auguuaugaguucuacaaag

SEQ ID NO: 13013 - RNA, 20 nt, Artificial Sequence
  SAMD9 targeting guide sequence portion
auguuccuugguuugguuaa

SEQ ID NO: 13014 - RNA, 20 nt, Artificial Sequence
  SAMD9 targeting guide sequence portion
auguugcuccucaguuugag

SEQ ID NO: 13015 - RNA, 20 nt, Artificial Sequence
  SAMD9 targeting guide sequence portion
auguuuaagaggaaauuaaa

SEQ ID NO: 13016 - RNA, 20 nt, Artificial Sequence
  SAMD9 targeting guide sequence portion
auuaaauacugcauguacag

SEQ ID NO: 13017 - RNA, 20 nt, Artificial Sequence
  SAMD9 targeting guide sequence portion
auuaaauggguacugagauc

SEQ ID NO: 13018 - RNA, 20 nt, Artificial Sequence
  SAMD9 targeting guide sequence portion
auuacacuaacuucuccuga

SEQ ID NO: 13019 - RNA, 20 nt, Artificial Sequence
  SAMD9 targeting guide sequence portion
auuagaaugucugggaaaau

SEQ ID NO: 13020 - RNA, 20 nt, Artificial Sequence
  SAMD9 targeting guide sequence portion
auuauuuugucaucaaugau

SEQ ID NO: 13021 - RNA, 20 nt, Artificial Sequence
  SAMD9 targeting guide sequence portion
auucuaaugucuaaaugcca

SEQ ID NO: 13022 - RNA, 20 nt, Artificial Sequence
  SAMD9 targeting guide sequence portion
auucuuacuaagcagaucau

SEQ ID NO: 13023 - RNA, 20 nt, Artificial Sequence
  SAMD9 targeting guide sequence portion
auucuuccuccaagaauuug

SEQ ID NO: 13024 - RNA, 20 nt, Artificial Sequence
  SAMD9 targeting guide sequence portion
auucuuggaggaagaauauc

SEQ ID NO: 13025 - RNA, 20 nt, Artificial Sequence
  SAMD9 targeting guide sequence portion
auugaagaagauugucuacu

SEQ ID NO: 13026 - RNA, 20 nt, Artificial Sequence
  SAMD9 targeting guide sequence portion
auugaugacaaaauaauaag

SEQ ID NO: 13027 - RNA, 20 nt, Artificial Sequence
  SAMD9 targeting guide sequence portion
auugaugaucugcuuaguaa

SEQ ID NO: 13028 - RNA, 20 nt, Artificial Sequence
  SAMD9 targeting guide sequence portion
auugucuacucaaauggcau

SEQ ID NO: 13029 - RNA, 20 nt, Artificial Sequence
  SAMD9 targeting guide sequence portion
auugucuuuguagaacucau

SEQ ID NO: 13030 - RNA, 20 nt, Artificial Sequence
  SAMD9 targeting guide sequence portion
auuuagacauuagaaugucu

SEQ ID NO: 13031 - RNA, 20 nt, Artificial Sequence
  SAMD9 targeting guide sequence portion
auuuauucuuacuaagcaga

SEQ ID NO: 13032 - RNA, 20 nt, Artificial Sequence
  SAMD9 targeting guide sequence portion
auuuccucuuaaacauguua

SEQ ID NO: 13033 - RNA, 20 nt, Artificial Sequence
  SAMD9 targeting guide sequence portion
auuucucaaagacagcaaaa

SEQ ID NO: 13034 - RNA, 20 nt, Artificial Sequence
  SAMD9 targeting guide sequence portion
auuugaguagacaaucuucu

SEQ ID NO: 13035 - RNA, 20 nt, Artificial Sequence
  SAMD9 targeting guide sequence portion
auuugaucucaguacccauu

SEQ ID NO: 13036 - RNA, 20 nt, Artificial Sequence
  SAMD9 targeting guide sequence portion
auuugcuacuuuucauauau

SEQ ID NO: 13037 - RNA, 20 nt, Artificial Sequence
  SAMD9 targeting guide sequence portion
auuuucccagacauucuaau

SEQ ID NO: 13038 - RNA, 20 nt, Artificial Sequence
  SAMD9 targeting guide sequence portion
auuuugucaucaaugauguu

SEQ ID NO: 13039 - RNA, 20 nt, Artificial Sequence
  SAMD9 targeting guide sequence portion
caaaaaccucucaaacugag

SEQ ID NO: 13040 - RNA, 20 nt, Artificial Sequence
  SAMD9 targeting guide sequence portion
caaaauaauaaggagcuaug

SEQ ID NO: 13041 - RNA, 20 nt, Artificial Sequence
  SAMD9 targeting guide sequence portion
caaaccaaggaacauauuug

SEQ ID NO: 13042 - RNA, 20 nt, Artificial Sequence
  SAMD9 targeting guide sequence portion
caaacugaggagcaacauuu

SEQ ID NO: 13043 - RNA, 20 nt, Artificial Sequence
  SAMD9 targeting guide sequence portion
caaagacaauagugaaaaag

SEQ ID NO: 13044 - RNA, 20 nt, Artificial Sequence
  SAMD9 targeting guide sequence portion
caaagacagcaaaaaccucu

SEQ ID NO: 13045 - RNA, 20 nt, Artificial Sequence
  SAMD9 targeting guide sequence portion
caaauauguuccuugguuug

SEQ ID NO: 13046 - RNA, 20 nt, Artificial Sequence
  SAMD9 targeting guide sequence portion
caaauggcauuuagacauua

SEQ ID NO: 13047 - RNA, 20 nt, Artificial Sequence
  SAMD9 targeting guide sequence portion
caaauucuuggaggaagaau

SEQ ID NO: 13048 - RNA, 20 nt, Artificial Sequence
  SAMD9 targeting guide sequence portion
caacauuuauucuuacuaag

SEQ ID NO: 13049 - RNA, 20 nt, Artificial Sequence
  SAMD9 targeting guide sequence portion
caagaauuugaucucaguac

SEQ ID NO: 13050 - RNA, 20 nt, Artificial Sequence
  SAMD9 targeting guide sequence portion
caagaucuaugcuuuaaacc

SEQ ID NO: 13051 - RNA, 20 nt, Artificial Sequence
  SAMD9 targeting guide sequence portion
caagcacaugauacauugau

SEQ ID NO: 13052 - RNA, 20 nt, Artificial Sequence
  SAMD9 targeting guide sequence portion
caaggaacauauuugcuacu

SEQ ID NO: 13053 - RNA, 20 nt, Artificial Sequence
  SAMD9 targeting guide sequence portion
caagguuauagauacagccu

SEQ ID NO: 13054 - RNA, 20 nt, Artificial Sequence
  SAMD9 targeting guide sequence portion
caauagugaaaaaggaagga

SEQ ID NO: 13055 - RNA, 20 nt, Artificial Sequence
  SAMD9 targeting guide sequence portion
caauccaugccugguaagua

SEQ ID NO: 13056 - RNA, 20 nt, Artificial Sequence
  SAMD9 targeting guide sequence portion
caaucuucuucaauccaugc

SEQ ID NO: 13057 - RNA, 20 nt, Artificial Sequence
  SAMD9 targeting guide sequence portion
caaugauguuaaccaaacca

SEQ ID NO: 13058 - RNA, 20 nt, Artificial Sequence
  SAMD9 targeting guide sequence portion
caauguaucaugugcuuggc

SEQ ID NO: 13059 - RNA, 20 nt, Artificial Sequence
  SAMD9 targeting guide sequence portion
cacagaaccccacuacuuac

SEQ ID NO: 13060 - RNA, 20 nt, Artificial Sequence
  SAMD9 targeting guide sequence portion
cacaugauacauugaugauc

SEQ ID NO: 13061 - RNA, 20 nt, Artificial Sequence
  SAMD9 targeting guide sequence portion
cacuaacuucuccugacucc

SEQ ID NO: 13062 - RNA, 20 nt, Artificial Sequence
  SAMD9 targeting guide sequence portion
cacuacuuaccaggcaugga

SEQ ID NO: 13063 - RNA, 20 nt, Artificial Sequence
  SAMD9 targeting guide sequence portion
cacuauugucuuuguagaac

SEQ ID NO: 13064 - RNA, 20 nt, Artificial Sequence
  SAMD9 targeting guide sequence portion
cacucaaggaucuuccaaaa

SEQ ID NO: 13065 - RNA, 20 nt, Artificial Sequence
  SAMD9 targeting guide sequence portion
cacuccuuccuuuuucacua

SEQ ID NO: 13066 - RNA, 20 nt, Artificial Sequence
  SAMD9 targeting guide sequence portion
cagaaccccacuacuuacca

SEQ ID NO: 13067 - RNA, 20 nt, Artificial Sequence
  SAMD9 targeting guide sequence portion
cagacauucuaaugucuaaa

SEQ ID NO: 13068 - RNA, 20 nt, Artificial Sequence
  SAMD9 targeting guide sequence portion
cagaucaucaauguaucaug

SEQ ID NO: 13069 - RNA, 20 nt, Artificial Sequence
  SAMD9 targeting guide sequence portion
cagaucugaagagcuagagg

SEQ ID NO: 13070 - RNA, 20 nt, Artificial Sequence
  SAMD9 targeting guide sequence portion
cagaucuguacaugcaguau

SEQ ID NO: 13071 - RNA, 20 nt, Artificial Sequence
  SAMD9 targeting guide sequence portion
cagcaaaaaccucucaaacu

SEQ ID NO: 13072 - RNA, 20 nt, Artificial Sequence
  SAMD9 targeting guide sequence portion
cagccucuagcucuucagau

SEQ ID NO: 13073 - RNA, 20 nt, Artificial Sequence
  SAMD9 targeting guide sequence portion
cagcuuauuacacuaacuuc

SEQ ID NO: 13074 - RNA, 20 nt, Artificial Sequence
  SAMD9 targeting guide sequence portion
caggagaaguuaguguaaua

SEQ ID NO: 13075 - RNA, 20 nt, Artificial Sequence
  SAMD9 targeting guide sequence portion
caggcauggauugaagaaga

SEQ ID NO: 13076 - RNA, 20 nt, Artificial Sequence
  SAMD9 targeting guide sequence portion
caguauuuaauuuccucuua

SEQ ID NO: 13077 - RNA, 20 nt, Artificial Sequence
  SAMD9 targeting guide sequence portion
cagucauagcuccuuauuau

SEQ ID NO: 13078 - RNA, 20 nt, Artificial Sequence
  SAMD9 targeting guide sequence portion
caguuugagagguuuuugcu

SEQ ID NO: 13079 - RNA, 20 nt, Artificial Sequence
  SAMD9 targeting guide sequence portion
cauaacauguuuaagaggaa

SEQ ID NO: 13080 - RNA, 20 nt, Artificial Sequence
  SAMD9 targeting guide sequence portion
cauagcuccuuauuauuuug

SEQ ID NO: 13081 - RNA, 20 nt, Artificial Sequence
  SAMD9 targeting guide sequence portion
cauauaucucacuccuuccu

SEQ ID NO: 13082 - RNA, 20 nt, Artificial Sequence
  SAMD9 targeting guide sequence portion
cauauuugcuacuuuucaua

SEQ ID NO: 13083 - RNA, 20 nt, Artificial Sequence
  SAMD9 targeting guide sequence portion
caucaaugauguuaaccaaa

SEQ ID NO: 13084 - RNA, 20 nt, Artificial Sequence
  SAMD9 targeting guide sequence portion
caucaauguaucaugugcuu

SEQ ID NO: 13085 - RNA, 20 nt, Artificial Sequence
  SAMD9 targeting guide sequence portion
caucauugaugacaaaauaa

SEQ ID NO: 13086 - RNA, 20 nt, Artificial Sequence
  SAMD9 targeting guide sequence portion
caugauacauugaugaucug

SEQ ID NO: 13087 - RNA, 20 nt, Artificial Sequence
  SAMD9 targeting guide sequence portion
caugcaguauuuaauuuccu

SEQ ID NO: 13088 - RNA, 20 nt, Artificial Sequence
  SAMD9 targeting guide sequence portion
caugccugguaaguaguggg

SEQ ID NO: 13089 - RNA, 20 nt, Artificial Sequence
  SAMD9 targeting guide sequence portion
cauggauugaagaagauugu

SEQ ID NO: 13090 - RNA, 20 nt, Artificial Sequence
  SAMD9 targeting guide sequence portion
cauguacagaucugaagagc

SEQ ID NO: 13091 - RNA, 20 nt, Artificial Sequence
  SAMD9 targeting guide sequence portion
caugugcuuggcacucaagg

SEQ ID NO: 13092 - RNA, 20 nt, Artificial Sequence
  SAMD9 targeting guide sequence portion
cauguuaugaguucuacaaa

SEQ ID NO: 13093 - RNA, 20 nt, Artificial Sequence
  SAMD9 targeting guide sequence portion
cauguuuaagaggaaauuaa

SEQ ID NO: 13094 - RNA, 20 nt, Artificial Sequence
  SAMD9 targeting guide sequence portion
cauuagaaugucugggaaaa

SEQ ID NO: 13095 - RNA, 20 nt, Artificial Sequence
  SAMD9 targeting guide sequence portion
cauucuaaugucuaaaugcc

SEQ ID NO: 13096 - RNA, 20 nt, Artificial Sequence
  SAMD9 targeting guide sequence portion
cauugaugacaaaauaauaa

SEQ ID NO: 13097 - RNA, 20 nt, Artificial Sequence
  SAMD9 targeting guide sequence portion
cauugaugaucugcuuagua

SEQ ID NO: 13098 - RNA, 20 nt, Artificial Sequence
  SAMD9 targeting guide sequence portion
cauuuagacauuagaauguc

SEQ ID NO: 13099 - RNA, 20 nt, Artificial Sequence
  SAMD9 targeting guide sequence portion
cauuuauucuuacuaagcag

SEQ ID NO: 13100 - RNA, 20 nt, Artificial Sequence
  SAMD9 targeting guide sequence portion
cauuugaguagacaaucuuc

SEQ ID NO: 13101 - RNA, 20 nt, Artificial Sequence
  SAMD9 targeting guide sequence portion
ccaaaccaaggaacauauuu

SEQ ID NO: 13102 - RNA, 20 nt, Artificial Sequence
  SAMD9 targeting guide sequence portion
ccaagaauuugaucucagua

SEQ ID NO: 13103 - RNA, 20 nt, Artificial Sequence
  SAMD9 targeting guide sequence portion
ccaagcacaugauacauuga

SEQ ID NO: 13104 - RNA, 20 nt, Artificial Sequence
  SAMD9 targeting guide sequence portion
ccaaggaacauauuugcuac

SEQ ID NO: 13105 - RNA, 20 nt, Artificial Sequence
  SAMD9 targeting guide sequence portion
ccacuacuuaccaggcaugg

SEQ ID NO: 13106 - RNA, 20 nt, Artificial Sequence
  SAMD9 targeting guide sequence portion
ccagacauucuaaugucuaa

SEQ ID NO: 13107 - RNA, 20 nt, Artificial Sequence
  SAMD9 targeting guide sequence portion
ccagcuuauuacacuaacuu

SEQ ID NO: 13108 - RNA, 20 nt, Artificial Sequence
  SAMD9 targeting guide sequence portion
ccaggcauggauugaagaag

SEQ ID NO: 13109 - RNA, 20 nt, Artificial Sequence
  SAMD9 targeting guide sequence portion
ccagucauagcuccuuauua

SEQ ID NO: 13110 - RNA, 20 nt, Artificial Sequence
  SAMD9 targeting guide sequence portion
ccaugccugguaaguagugg

SEQ ID NO: 13111 - RNA, 20 nt, Artificial Sequence
  SAMD9 targeting guide sequence portion
ccauuugaguagacaaucuu

SEQ ID NO: 13112 - RNA, 20 nt, Artificial Sequence
  SAMD9 targeting guide sequence portion
cccacuacuuaccaggcaug

SEQ ID NO: 13113 - RNA, 20 nt, Artificial Sequence
  SAMD9 targeting guide sequence portion
cccagacauucuaaugucua

SEQ ID NO: 13114 - RNA, 20 nt, Artificial Sequence
  SAMD9 targeting guide sequence portion
ccccacuacuuaccaggcau

SEQ ID NO: 13115 - RNA, 20 nt, Artificial Sequence
  SAMD9 targeting guide sequence portion
ccggcaagguuauagauaca

SEQ ID NO: 13116 - RNA, 20 nt, Artificial Sequence
  SAMD9 targeting guide sequence portion
ccgguuuaaagcauagaucu

SEQ ID NO: 13117 - RNA, 20 nt, Artificial Sequence
  SAMD9 targeting guide sequence portion
ccucaguuugagagguuuuu

SEQ ID NO: 13118 - RNA, 20 nt, Artificial Sequence
  SAMD9 targeting guide sequence portion
ccuccaagaauuugaucuca

SEQ ID NO: 13119 - RNA, 20 nt, Artificial Sequence
  SAMD9 targeting guide sequence portion
ccucuagcucuucagaucug

SEQ ID NO: 13120 - RNA, 20 nt, Artificial Sequence
  SAMD9 targeting guide sequence portion
ccucucaaacugaggagcaa

SEQ ID NO: 13121 - RNA, 20 nt, Artificial Sequence
  SAMD9 targeting guide sequence portion
ccucuguuuuggaagauccu

SEQ ID NO: 13122 - RNA, 20 nt, Artificial Sequence
  SAMD9 targeting guide sequence portion
ccucuuaaacauguuaugag

SEQ ID NO: 13123 - RNA, 20 nt, Artificial Sequence
  SAMD9 targeting guide sequence portion
ccugacuccagucauagcuc

SEQ ID NO: 13124 - RNA, 20 nt, Artificial Sequence
  SAMD9 targeting guide sequence portion
ccugauauucuuccuccaag

SEQ ID NO: 13125 - RNA, 20 nt, Artificial Sequence
  SAMD9 targeting guide sequence portion
ccugguaaguagugggguuc

SEQ ID NO: 13126 - RNA, 20 nt, Artificial Sequence
  SAMD9 targeting guide sequence portion
ccuuauuauuuugucaucaa

SEQ ID NO: 13127 - RNA, 20 nt, Artificial Sequence
  SAMD9 targeting guide sequence portion
ccuuccuuuuucacuauugu

SEQ ID NO: 13128 - RNA, 20 nt, Artificial Sequence
  SAMD9 targeting guide sequence portion
ccuugagugccaagcacaug

SEQ ID NO: 13129 - RNA, 20 nt, Artificial Sequence
  SAMD9 targeting guide sequence portion
ccuugccgguuuaaagcaua

SEQ ID NO: 13130 - RNA, 20 nt, Artificial Sequence
  SAMD9 targeting guide sequence portion
ccuugguuugguuaacauca

SEQ ID NO: 13131 - RNA, 20 nt, Artificial Sequence
  SAMD9 targeting guide sequence portion
ccuuuuucacuauugucuuu

SEQ ID NO: 13132 - RNA, 20 nt, Artificial Sequence
  SAMD9 targeting guide sequence portion
cggcaagguuauagauacag

SEQ ID NO: 13133 - RNA, 20 nt, Artificial Sequence
  SAMD9 targeting guide sequence portion
cgguuuaaagcauagaucuu

SEQ ID NO: 13134 - RNA, 20 nt, Artificial Sequence
  SAMD9 targeting guide sequence portion
cuaaaugccauuugaguaga

SEQ ID NO: 13135 - RNA, 20 nt, Artificial Sequence
  SAMD9 targeting guide sequence portion
cuaacuucuccugacuccag

SEQ ID NO: 13136 - RNA, 20 nt, Artificial Sequence
  SAMD9 targeting guide sequence portion
cuaagcagaucaucaaugua

SEQ ID NO: 13137 - RNA, 20 nt, Artificial Sequence
  SAMD9 targeting guide sequence portion
cuaaugucuaaaugccauuu

SEQ ID NO: 13138 - RNA, 20 nt, Artificial Sequence
  SAMD9 targeting guide sequence portion
cuacaaagacaauagugaaa

SEQ ID NO: 13139 - RNA, 20 nt, Artificial Sequence
  SAMD9 targeting guide sequence portion
cuacacagaaccccacuacu

SEQ ID NO: 13140 - RNA, 20 nt, Artificial Sequence
  SAMD9 targeting guide sequence portion
cuacucaaauggcauuuaga

SEQ ID NO: 13141 - RNA, 20 nt, Artificial Sequence
  SAMD9 targeting guide sequence portion
cuacuuaccaggcauggauu

SEQ ID NO: 13142 - RNA, 20 nt, Artificial Sequence
  SAMD9 targeting guide sequence portion
cuacuuuucauauaucucac

SEQ ID NO: 13143 - RNA, 20 nt, Artificial Sequence
  SAMD9 targeting guide sequence portion
cuagaggcuguaucuauaac

SEQ ID NO: 13144 - RNA, 20 nt, Artificial Sequence
  SAMD9 targeting guide sequence portion
cuagcucuucagaucuguac

SEQ ID NO: 13145 - RNA, 20 nt, Artificial Sequence
  SAMD9 targeting guide sequence portion
cuauaaccuugccgguuuaa

SEQ ID NO: 13146 - RNA, 20 nt, Artificial Sequence
  SAMD9 targeting guide sequence portion
cuaugacuggagucaggaga

SEQ ID NO: 13147 - RNA, 20 nt, Artificial Sequence
  SAMD9 targeting guide sequence portion
cuaugcuuuaaaccggcaag

SEQ ID NO: 13148 - RNA, 20 nt, Artificial Sequence
  SAMD9 targeting guide sequence portion
cuauugucuuuguagaacuc

SEQ ID NO: 13149 - RNA, 20 nt, Artificial Sequence
  SAMD9 targeting guide sequence portion
cucaaacugaggagcaacau

SEQ ID NO: 13150 - RNA, 20 nt, Artificial Sequence
  SAMD9 targeting guide sequence portion
cucaaagacagcaaaaaccu

SEQ ID NO: 13151 - RNA, 20 nt, Artificial Sequence
  SAMD9 targeting guide sequence portion
cucaaauggcauuuagacau

SEQ ID NO: 13152 - RNA, 20 nt, Artificial Sequence
  SAMD9 targeting guide sequence portion
cucaagaucuaugcuuuaaa

SEQ ID NO: 13153 - RNA, 20 nt, Artificial Sequence
  SAMD9 targeting guide sequence portion
cucaaggaucuuccaaaaca

SEQ ID NO: 13154 - RNA, 20 nt, Artificial Sequence
  SAMD9 targeting guide sequence portion
cucacuccuuccuuuuucac

SEQ ID NO: 13155 - RNA, 20 nt, Artificial Sequence
  SAMD9 targeting guide sequence portion
cucaguuugagagguuuuug

SEQ ID NO: 13156 - RNA, 20 nt, Artificial Sequence
  SAMD9 targeting guide sequence portion
cucauaacauguuuaagagg

SEQ ID NO: 13157 - RNA, 20 nt, Artificial Sequence
  SAMD9 targeting guide sequence portion
cuccaagaauuugaucucag

SEQ ID NO: 13158 - RNA, 20 nt, Artificial Sequence
  SAMD9 targeting guide sequence portion
cuccagucauagcuccuuau

SEQ ID NO: 13159 - RNA, 20 nt, Artificial Sequence
  SAMD9 targeting guide sequence portion
cuccucaguuugagagguuu

SEQ ID NO: 13160 - RNA, 20 nt, Artificial Sequence
  SAMD9 targeting guide sequence portion
cuccugacuccagucauagc

SEQ ID NO: 13161 - RNA, 20 nt, Artificial Sequence
  SAMD9 targeting guide sequence portion
cuccuuauuauuuugucauc

SEQ ID NO: 13162 - RNA, 20 nt, Artificial Sequence
  SAMD9 targeting guide sequence portion
cuccuuccuuuuucacuauu

SEQ ID NO: 13163 - RNA, 20 nt, Artificial Sequence
  SAMD9 targeting guide sequence portion
cucuagcucuucagaucugu

SEQ ID NO: 13164 - RNA, 20 nt, Artificial Sequence
  SAMD9 targeting guide sequence portion
cucucaaacugaggagcaac

SEQ ID NO: 13165 - RNA, 20 nt, Artificial Sequence
  SAMD9 targeting guide sequence portion
cucuguuuuggaagauccuu

SEQ ID NO: 13166 - RNA, 20 nt, Artificial Sequence
  SAMD9 targeting guide sequence portion
cucuuaaacauguuaugagu

SEQ ID NO: 13167 - RNA, 20 nt, Artificial Sequence
  SAMD9 targeting guide sequence portion
cucuucagaucuguacaugc

SEQ ID NO: 13168 - RNA, 20 nt, Artificial Sequence
  SAMD9 targeting guide sequence portion
cugaagagcuagaggcugua

SEQ ID NO: 13169 - RNA, 20 nt, Artificial Sequence
  SAMD9 targeting guide sequence portion
cugacuccagucauagcucc

SEQ ID NO: 13170 - RNA, 20 nt, Artificial Sequence
  SAMD9 targeting guide sequence portion
cugagaucaaauucuuggag

SEQ ID NO: 13171 - RNA, 20 nt, Artificial Sequence
  SAMD9 targeting guide sequence portion
cugaggagcaacauuuauuc

SEQ ID NO: 13172 - RNA, 20 nt, Artificial Sequence
  SAMD9 targeting guide sequence portion
cugauauucuuccuccaaga

SEQ ID NO: 13173 - RNA, 20 nt, Artificial Sequence
  SAMD9 targeting guide sequence portion
cugcauguacagaucugaag

SEQ ID NO: 13174 - RNA, 20 nt, Artificial Sequence
  SAMD9 targeting guide sequence portion
cugcuuaguaagaauaaaug

SEQ ID NO: 13175 - RNA, 20 nt, Artificial Sequence
  SAMD9 targeting guide sequence portion
cuggagucaggagaaguuag

SEQ ID NO: 13176 - RNA, 20 nt, Artificial Sequence
  SAMD9 targeting guide sequence portion
cuggcuacacagaaccccac

SEQ ID NO: 13177 - RNA, 20 nt, Artificial Sequence
  SAMD9 targeting guide sequence portion
cugggaaaauauuucucaaa

SEQ ID NO: 13178 - RNA, 20 nt, Artificial Sequence
  SAMD9 targeting guide sequence portion
cugguaaguagugggguucu

SEQ ID NO: 13179 - RNA, 20 nt, Artificial Sequence
  SAMD9 targeting guide sequence portion
cuguacaugcaguauuuaau

SEQ ID NO: 13180 - RNA, 20 nt, Artificial Sequence
  SAMD9 targeting guide sequence portion
cuguaucuauaaccuugccg

SEQ ID NO: 13181 - RNA, 20 nt, Artificial Sequence
  SAMD9 targeting guide sequence portion
cugucuuugagaaauauuuu

SEQ ID NO: 13182 - RNA, 20 nt, Artificial Sequence
  SAMD9 targeting guide sequence portion
cuguguagccagcuuauuac

SEQ ID NO: 13183 - RNA, 20 nt, Artificial Sequence
  SAMD9 targeting guide sequence portion
cuguuuuggaagauccuuga

SEQ ID NO: 13184 - RNA, 20 nt, Artificial Sequence
  SAMD9 targeting guide sequence portion
cuuaaacauguuaugaguuc

SEQ ID NO: 13185 - RNA, 20 nt, Artificial Sequence
  SAMD9 targeting guide sequence portion
cuuaccaggcauggauugaa

SEQ ID NO: 13186 - RNA, 20 nt, Artificial Sequence
  SAMD9 targeting guide sequence portion
cuuacuaagcagaucaucaa

SEQ ID NO: 13187 - RNA, 20 nt, Artificial Sequence
  SAMD9 targeting guide sequence portion
cuuaguaagaauaaauguug

SEQ ID NO: 13188 - RNA, 20 nt, Artificial Sequence
  SAMD9 targeting guide sequence portion
cuuauuacacuaacuucucc

SEQ ID NO: 13189 - RNA, 20 nt, Artificial Sequence
  SAMD9 targeting guide sequence portion
cuuauuauuuugucaucaau

SEQ ID NO: 13190 - RNA, 20 nt, Artificial Sequence
  SAMD9 targeting guide sequence portion
cuucaauccaugccugguaa

SEQ ID NO: 13191 - RNA, 20 nt, Artificial Sequence
  SAMD9 targeting guide sequence portion
cuucagaucuguacaugcag

SEQ ID NO: 13192 - RNA, 20 nt, Artificial Sequence
  SAMD9 targeting guide sequence portion
cuuccuccaagaauuugauc

SEQ ID NO: 13193 - RNA, 20 nt, Artificial Sequence
  SAMD9 targeting guide sequence portion
cuuccuuuuucacuauuguc

SEQ ID NO: 13194 - RNA, 20 nt, Artificial Sequence
  SAMD9 targeting guide sequence portion
cuucuccugacuccagucau

SEQ ID NO: 13195 - RNA, 20 nt, Artificial Sequence
  SAMD9 targeting guide sequence portion
cuucuucaauccaugccugg

SEQ ID NO: 13196 - RNA, 20 nt, Artificial Sequence
  SAMD9 targeting guide sequence portion
cuugagugccaagcacauga

SEQ ID NO: 13197 - RNA, 20 nt, Artificial Sequence
  SAMD9 targeting guide sequence portion
cuugccgguuuaaagcauag

SEQ ID NO: 13198 - RNA, 20 nt, Artificial Sequence
  SAMD9 targeting guide sequence portion
cuuggcacucaaggaucuuc

SEQ ID NO: 13199 - RNA, 20 nt, Artificial Sequence
  SAMD9 targeting guide sequence portion
cuugguuugguuaacaucau

SEQ ID NO: 13200 - RNA, 20 nt, Artificial Sequence
  SAMD9 targeting guide sequence portion
cuuuaaaccggcaagguuau

SEQ ID NO: 13201 - RNA, 20 nt, Artificial Sequence
  SAMD9 targeting guide sequence portion
cuuugagaaauauuuuccca

SEQ ID NO: 13202 - RNA, 20 nt, Artificial Sequence
  SAMD9 targeting guide sequence portion
cuuuguagaacucauaacau

SEQ ID NO: 13203 - RNA, 20 nt, Artificial Sequence
  SAMD9 targeting guide sequence portion
cuuuucauauaucucacucc

SEQ ID NO: 13204 - RNA, 20 nt, Artificial Sequence
  SAMD9 targeting guide sequence portion
cuuuuucacuauugucuuug

SEQ ID NO: 13205 - RNA, 20 nt, Artificial Sequence
  SAMD9 targeting guide sequence portion
gaaaaaggaaggagugagau

SEQ ID NO: 13206 - RNA, 20 nt, Artificial Sequence
  SAMD9 targeting guide sequence portion
gaaaaguagcaaauauguuc

SEQ ID NO: 13207 - RNA, 20 nt, Artificial Sequence
  SAMD9 targeting guide sequence portion
gaaaauauuucucaaagaca

SEQ ID NO: 13208 - RNA, 20 nt, Artificial Sequence
  SAMD9 targeting guide sequence portion
gaaauauuuucccagacauu

SEQ ID NO: 13209 - RNA, 20 nt, Artificial Sequence
  SAMD9 targeting guide sequence portion
gaaauuaaauacugcaugua

SEQ ID NO: 13210 - RNA, 20 nt, Artificial Sequence
  SAMD9 targeting guide sequence portion
gaacauauuugcuacuuuuc

SEQ ID NO: 13211 - RNA, 20 nt, Artificial Sequence
  SAMD9 targeting guide sequence portion
gaaccccacuacuuaccagg

SEQ ID NO: 13212 - RNA, 20 nt, Artificial Sequence
  SAMD9 targeting guide sequence portion
gaacucauaacauguuuaag

SEQ ID NO: 13213 - RNA, 20 nt, Artificial Sequence
  SAMD9 targeting guide sequence portion
gaagaagauugucuacucaa

SEQ ID NO: 13214 - RNA, 20 nt, Artificial Sequence
  SAMD9 targeting guide sequence portion
gaagagcuagaggcuguauc

SEQ ID NO: 13215 - RNA, 20 nt, Artificial Sequence
  SAMD9 targeting guide sequence portion
gaagauccuugagugccaag

SEQ ID NO: 13216 - RNA, 20 nt, Artificial Sequence
  SAMD9 targeting guide sequence portion
gaagauugucuacucaaaug

SEQ ID NO: 13217 - RNA, 20 nt, Artificial Sequence
  SAMD9 targeting guide sequence portion
gaaggagugagauauaugaa

SEQ ID NO: 13218 - RNA, 20 nt, Artificial Sequence
  SAMD9 targeting guide sequence portion
gaaguuaguguaauaagcug

SEQ ID NO: 13219 - RNA, 20 nt, Artificial Sequence
  SAMD9 targeting guide sequence portion
gaauaaauguugcuccucag

SEQ ID NO: 13220 - RNA, 20 nt, Artificial Sequence
  SAMD9 targeting guide sequence portion
gaaugucugggaaaauauuu

SEQ ID NO: 13221 - RNA, 20 nt, Artificial Sequence
  SAMD9 targeting guide sequence portion
gaauuugaucucaguaccca

SEQ ID NO: 13222 - RNA, 20 nt, Artificial Sequence
  SAMD9 targeting guide sequence portion
gacaaaauaauaaggagcua

SEQ ID NO: 13223 - RNA, 20 nt, Artificial Sequence
  SAMD9 targeting guide sequence portion
gacaauagugaaaaaggaag

SEQ ID NO: 13224 - RNA, 20 nt, Artificial Sequence
  SAMD9 targeting guide sequence portion
gacaaucuucuucaauccau

SEQ ID NO: 13225 - RNA, 20 nt, Artificial Sequence
  SAMD9 targeting guide sequence portion
gacagcaaaaaccucucaaa

SEQ ID NO: 13226 - RNA, 20 nt, Artificial Sequence
  SAMD9 targeting guide sequence portion
gacauuagaaugucugggaa

SEQ ID NO: 13227 - RNA, 20 nt, Artificial Sequence
  SAMD9 targeting guide sequence portion
gacauucuaaugucuaaaug

SEQ ID NO: 13228 - RNA, 20 nt, Artificial Sequence
  SAMD9 targeting guide sequence portion
gacucaagaucuaugcuuua

SEQ ID NO: 13229 - RNA, 20 nt, Artificial Sequence
  SAMD9 targeting guide sequence portion
gacuccagucauagcuccuu

SEQ ID NO: 13230 - RNA, 20 nt, Artificial Sequence
  SAMD9 targeting guide sequence portion
gacuggagucaggagaaguu

SEQ ID NO: 13231 - RNA, 20 nt, Artificial Sequence
  SAMD9 targeting guide sequence portion
gagaaauauuuucccagaca

SEQ ID NO: 13232 - RNA, 20 nt, Artificial Sequence
  SAMD9 targeting guide sequence portion
gagaaguuaguguaauaagc

SEQ ID NO: 13233 - RNA, 20 nt, Artificial Sequence
  SAMD9 targeting guide sequence portion
gagagguuuuugcugucuuu

SEQ ID NO: 13234 - RNA, 20 nt, Artificial Sequence
  SAMD9 targeting guide sequence portion
gagauauaugaaaaguagca

SEQ ID NO: 13235 - RNA, 20 nt, Artificial Sequence
  SAMD9 targeting guide sequence portion
gagaucaaauucuuggagga

SEQ ID NO: 13236 - RNA, 20 nt, Artificial Sequence
  SAMD9 targeting guide sequence portion
gagcaacauuuauucuuacu

SEQ ID NO: 13237 - RNA, 20 nt, Artificial Sequence
  SAMD9 targeting guide sequence portion
gagccugauauucuuccucc

SEQ ID NO: 13238 - RNA, 20 nt, Artificial Sequence
  SAMD9 targeting guide sequence portion
gagcuagaggcuguaucuau

SEQ ID NO: 13239 - RNA, 20 nt, Artificial Sequence
  SAMD9 targeting guide sequence portion
gagcuaugacuggagucagg

SEQ ID NO: 13240 - RNA, 20 nt, Artificial Sequence
  SAMD9 targeting guide sequence portion
gaggaaauuaaauacugcau

SEQ ID NO: 13241 - RNA, 20 nt, Artificial Sequence
  SAMD9 targeting guide sequence portion
gaggagcaacauuuauucuu

SEQ ID NO: 13242 - RNA, 20 nt, Artificial Sequence
  SAMD9 targeting guide sequence portion
gaggcuguaucuauaaccuu

SEQ ID NO: 13243 - RNA, 20 nt, Artificial Sequence
  SAMD9 targeting guide sequence portion
gagguuuuugcugucuuuga

SEQ ID NO: 13244 - RNA, 20 nt, Artificial Sequence
  SAMD9 targeting guide sequence portion
gaguagacaaucuucuucaa

SEQ ID NO: 13245 - RNA, 20 nt, Artificial Sequence
  SAMD9 targeting guide sequence portion
gagucaggagaaguuagugu

SEQ ID NO: 13246 - RNA, 20 nt, Artificial Sequence
  SAMD9 targeting guide sequence portion
gagugagauauaugaaaagu

SEQ ID NO: 13247 - RNA, 20 nt, Artificial Sequence
  SAMD9 targeting guide sequence portion
gagugccaagcacaugauac

SEQ ID NO: 13248 - RNA, 20 nt, Artificial Sequence
  SAMD9 targeting guide sequence portion
gaguucuacaaagacaauag

SEQ ID NO: 13249 - RNA, 20 nt, Artificial Sequence
  SAMD9 targeting guide sequence portion
gauacagccucuagcucuuc

SEQ ID NO: 13250 - RNA, 20 nt, Artificial Sequence
  SAMD9 targeting guide sequence portion
gauacauugaugaucugcuu

SEQ ID NO: 13251 - RNA, 20 nt, Artificial Sequence
  SAMD9 targeting guide sequence portion
gauauaugaaaaguagcaaa

SEQ ID NO: 13252 - RNA, 20 nt, Artificial Sequence
  SAMD9 targeting guide sequence portion
gauauucuuccuccaagaau

SEQ ID NO: 13253 - RNA, 20 nt, Artificial Sequence
  SAMD9 targeting guide sequence portion
gaucaaauucuuggaggaag

SEQ ID NO: 13254 - RNA, 20 nt, Artificial Sequence
  SAMD9 targeting guide sequence portion
gaucaucaauguaucaugug

SEQ ID NO: 13255 - RNA, 20 nt, Artificial Sequence
  SAMD9 targeting guide sequence portion
gauccuugagugccaagcac

SEQ ID NO: 13256 - RNA, 20 nt, Artificial Sequence
  SAMD9 targeting guide sequence portion
gaucuaugcuuuaaaccggc

SEQ ID NO: 13257 - RNA, 20 nt, Artificial Sequence
  SAMD9 targeting guide sequence portion
gaucugaagagcuagaggcu

SEQ ID NO: 13258 - RNA, 20 nt, Artificial Sequence
  SAMD9 targeting guide sequence portion
gaucugcuuaguaagaauaa

SEQ ID NO: 13259 - RNA, 20 nt, Artificial Sequence
  SAMD9 targeting guide sequence portion
gaucuguacaugcaguauuu

SEQ ID NO: 13260 - RNA, 20 nt, Artificial Sequence
  SAMD9 targeting guide sequence portion
gaugacaaaauaauaaggag

SEQ ID NO: 13261 - RNA, 20 nt, Artificial Sequence
  SAMD9 targeting guide sequence portion
gaugaucugcuuaguaagaa

SEQ ID NO: 13262 - RNA, 20 nt, Artificial Sequence
  SAMD9 targeting guide sequence portion
gauguuaaccaaaccaagga

SEQ ID NO: 13263 - RNA, 20 nt, Artificial Sequence
  SAMD9 targeting guide sequence portion
gauugaagaagauugucuac

SEQ ID NO: 13264 - RNA, 20 nt, Artificial Sequence
  SAMD9 targeting guide sequence portion
gauugucuacucaaauggca

SEQ ID NO: 13265 - RNA, 20 nt, Artificial Sequence
  SAMD9 targeting guide sequence portion
gcaaaaaccucucaaacuga

SEQ ID NO: 13266 - RNA, 20 nt, Artificial Sequence
  SAMD9 targeting guide sequence portion
gcaaauauguuccuugguuu

SEQ ID NO: 13267 - RNA, 20 nt, Artificial Sequence
  SAMD9 targeting guide sequence portion
gcaacauuuauucuuacuaa

SEQ ID NO: 13268 - RNA, 20 nt, Artificial Sequence
  SAMD9 targeting guide sequence portion
gcaagguuauagauacagcc

SEQ ID NO: 13269 - RNA, 20 nt, Artificial Sequence
  SAMD9 targeting guide sequence portion
gcacaugauacauugaugau

SEQ ID NO: 13270 - RNA, 20 nt, Artificial Sequence
  SAMD9 targeting guide sequence portion
gcacucaaggaucuuccaaa

SEQ ID NO: 13271 - RNA, 20 nt, Artificial Sequence
  SAMD9 targeting guide sequence portion
gcagaucaucaauguaucau

SEQ ID NO: 13272 - RNA, 20 nt, Artificial Sequence
  SAMD9 targeting guide sequence portion
gcaguauuuaauuuccucuu

SEQ ID NO: 13273 - RNA, 20 nt, Artificial Sequence
  SAMD9 targeting guide sequence portion
gcauggauugaagaagauug

SEQ ID NO: 13274 - RNA, 20 nt, Artificial Sequence
  SAMD9 targeting guide sequence portion
gcauguacagaucugaagag

SEQ ID NO: 13275 - RNA, 20 nt, Artificial Sequence
  SAMD9 targeting guide sequence portion
gcauuuagacauuagaaugu

SEQ ID NO: 13276 - RNA, 20 nt, Artificial Sequence
  SAMD9 targeting guide sequence portion
gccaagcacaugauacauug

SEQ ID NO: 13277 - RNA, 20 nt, Artificial Sequence
  SAMD9 targeting guide sequence portion
gccagcuuauuacacuaacu

SEQ ID NO: 13278 - RNA, 20 nt, Artificial Sequence
  SAMD9 targeting guide sequence portion
gccauuugaguagacaaucu

SEQ ID NO: 13279 - RNA, 20 nt, Artificial Sequence
  SAMD9 targeting guide sequence portion
gccgguuuaaagcauagauc

SEQ ID NO: 13280 - RNA, 20 nt, Artificial Sequence
  SAMD9 targeting guide sequence portion
gccucuagcucuucagaucu

SEQ ID NO: 13281 - RNA, 20 nt, Artificial Sequence
  SAMD9 targeting guide sequence portion
gccugauauucuuccuccaa

SEQ ID NO: 13282 - RNA, 20 nt, Artificial Sequence
  SAMD9 targeting guide sequence portion
gccugguaaguagugggguu

SEQ ID NO: 13283 - RNA, 20 nt, Artificial Sequence
  SAMD9 targeting guide sequence portion
gcuacacagaaccccacuac

SEQ ID NO: 13284 - RNA, 20 nt, Artificial Sequence
  SAMD9 targeting guide sequence portion
gcuacuuuucauauaucuca

SEQ ID NO: 13285 - RNA, 20 nt, Artificial Sequence
  SAMD9 targeting guide sequence portion
gcuagaggcuguaucuauaa

SEQ ID NO: 13286 - RNA, 20 nt, Artificial Sequence
  SAMD9 targeting guide sequence portion
gcuaugacuggagucaggag

SEQ ID NO: 13287 - RNA, 20 nt, Artificial Sequence
  SAMD9 targeting guide sequence portion
gcuccucaguuugagagguu

SEQ ID NO: 13288 - RNA, 20 nt, Artificial Sequence
  SAMD9 targeting guide sequence portion
gcuccuuauuauuuugucau

SEQ ID NO: 13289 - RNA, 20 nt, Artificial Sequence
  SAMD9 targeting guide sequence portion
gcucuucagaucuguacaug

SEQ ID NO: 13290 - RNA, 20 nt, Artificial Sequence
  SAMD9 targeting guide sequence portion
gcuggcuacacagaacccca

SEQ ID NO: 13291 - RNA, 20 nt, Artificial Sequence
  SAMD9 targeting guide sequence portion
gcuguaucuauaaccuugcc

SEQ ID NO: 13292 - RNA, 20 nt, Artificial Sequence
  SAMD9 targeting guide sequence portion
gcugucuuugagaaauauuu

SEQ ID NO: 13293 - RNA, 20 nt, Artificial Sequence
  SAMD9 targeting guide sequence portion
gcuuaguaagaauaaauguu

SEQ ID NO: 13294 - RNA, 20 nt, Artificial Sequence
  SAMD9 targeting guide sequence portion
gcuuauuacacuaacuucuc

SEQ ID NO: 13295 - RNA, 20 nt, Artificial Sequence
  SAMD9 targeting guide sequence portion
gcuuggcacucaaggaucuu

SEQ ID NO: 13296 - RNA, 20 nt, Artificial Sequence
  SAMD9 targeting guide sequence portion
gcuuuaaaccggcaagguua

SEQ ID NO: 13297 - RNA, 20 nt, Artificial Sequence
  SAMD9 targeting guide sequence portion
ggaaaauauuucucaaagac

SEQ ID NO: 13298 - RNA, 20 nt, Artificial Sequence
  SAMD9 targeting guide sequence portion
ggaaauuaaauacugcaugu

SEQ ID NO: 13299 - RNA, 20 nt, Artificial Sequence
  SAMD9 targeting guide sequence portion
ggaacauauuugcuacuuuu

SEQ ID NO: 13300 - RNA, 20 nt, Artificial Sequence
  SAMD9 targeting guide sequence portion
ggaagauccuugagugccaa

SEQ ID NO: 13301 - RNA, 20 nt, Artificial Sequence
  SAMD9 targeting guide sequence portion
ggaaggagugagauauauga

SEQ ID NO: 13302 - RNA, 20 nt, Artificial Sequence
  SAMD9 targeting guide sequence portion
ggacucaagaucuaugcuuu

SEQ ID NO: 13303 - RNA, 20 nt, Artificial Sequence
  SAMD9 targeting guide sequence portion
ggagaaguuaguguaauaag

SEQ ID NO: 13304 - RNA, 20 nt, Artificial Sequence
  SAMD9 targeting guide sequence portion
ggagcaacauuuauucuuac

SEQ ID NO: 13305 - RNA, 20 nt, Artificial Sequence
  SAMD9 targeting guide sequence portion
ggagcuaugacuggagucag

SEQ ID NO: 13306 - RNA, 20 nt, Artificial Sequence
  SAMD9 targeting guide sequence portion
ggagucaggagaaguuagug

SEQ ID NO: 13307 - RNA, 20 nt, Artificial Sequence
  SAMD9 targeting guide sequence portion
ggagugagauauaugaaaag

SEQ ID NO: 13308 - RNA, 20 nt, Artificial Sequence
  SAMD9 targeting guide sequence portion
ggauugaagaagauugucua

SEQ ID NO: 13309 - RNA, 20 nt, Artificial Sequence
  SAMD9 targeting guide sequence portion
ggcaagguuauagauacagc

SEQ ID NO: 13310 - RNA, 20 nt, Artificial Sequence
  SAMD9 targeting guide sequence portion
ggcacucaaggaucuuccaa

SEQ ID NO: 13311 - RNA, 20 nt, Artificial Sequence
  SAMD9 targeting guide sequence portion
ggcauggauugaagaagauu

SEQ ID NO: 13312 - RNA, 20 nt, Artificial Sequence
  SAMD9 targeting guide sequence portion
ggcauuuagacauuagaaug

SEQ ID NO: 13313 - RNA, 20 nt, Artificial Sequence
  SAMD9 targeting guide sequence portion
ggcuacacagaaccccacua

SEQ ID NO: 13314 - RNA, 20 nt, Artificial Sequence
  SAMD9 targeting guide sequence portion
ggcuguaucuauaaccuugc

SEQ ID NO: 13315 - RNA, 20 nt, Artificial Sequence
  SAMD9 targeting guide sequence portion
gggaaaauauuucucaaaga

SEQ ID NO: 13316 - RNA, 20 nt, Artificial Sequence
  SAMD9 targeting guide sequence portion
gggguucuguguagccagcu

SEQ ID NO: 13317 - RNA, 20 nt, Artificial Sequence
  SAMD9 targeting guide sequence portion
ggguacugagaucaaauucu

SEQ ID NO: 13318 - RNA, 20 nt, Artificial Sequence
  SAMD9 targeting guide sequence portion
ggguucuguguagccagcuu

SEQ ID NO: 13319 - RNA, 20 nt, Artificial Sequence
  SAMD9 targeting guide sequence portion
gguaaguagugggguucugu

SEQ ID NO: 13320 - RNA, 20 nt, Artificial Sequence
  SAMD9 targeting guide sequence portion
gguacugagaucaaauucuu

SEQ ID NO: 13321 - RNA, 20 nt, Artificial Sequence
  SAMD9 targeting guide sequence portion
gguuaacaucauugaugaca

SEQ ID NO: 13322 - RNA, 20 nt, Artificial Sequence
  SAMD9 targeting guide sequence portion
gguuauagauacagccucua

SEQ ID NO: 13323 - RNA, 20 nt, Artificial Sequence
  SAMD9 targeting guide sequence portion
gguucuguguagccagcuua

SEQ ID NO: 13324 - RNA, 20 nt, Artificial Sequence
  SAMD9 targeting guide sequence portion
gguuuaaagcauagaucuug

SEQ ID NO: 13325 - RNA, 20 nt, Artificial Sequence
  SAMD9 targeting guide sequence portion
gguuugguuaacaucauuga

SEQ ID NO: 13326 - RNA, 20 nt, Artificial Sequence
  SAMD9 targeting guide sequence portion
gguuuuugcugucuuugaga

SEQ ID NO: 13327 - RNA, 20 nt, Artificial Sequence
  SAMD9 targeting guide sequence portion
guaagaauaaauguugcucc

SEQ ID NO: 13328 - RNA, 20 nt, Artificial Sequence
  SAMD9 targeting guide sequence portion
guaaguagugggguucugug

SEQ ID NO: 13329 - RNA, 20 nt, Artificial Sequence
  SAMD9 targeting guide sequence portion
guaauaagcuggcuacacag

SEQ ID NO: 13330 - RNA, 20 nt, Artificial Sequence
  SAMD9 targeting guide sequence portion
guacagaucugaagagcuag

SEQ ID NO: 13331 - RNA, 20 nt, Artificial Sequence
  SAMD9 targeting guide sequence portion
guacaugcaguauuuaauuu

SEQ ID NO: 13332 - RNA, 20 nt, Artificial Sequence
  SAMD9 targeting guide sequence portion
guacugagaucaaauucuug

SEQ ID NO: 13333 - RNA, 20 nt, Artificial Sequence
  SAMD9 targeting guide sequence portion
guagaacucauaacauguuu

SEQ ID NO: 13334 - RNA, 20 nt, Artificial Sequence
  SAMD9 targeting guide sequence portion
guagacaaucuucuucaauc

SEQ ID NO: 13335 - RNA, 20 nt, Artificial Sequence
  SAMD9 targeting guide sequence portion
guagcaaauauguuccuugg

SEQ ID NO: 13336 - RNA, 20 nt, Artificial Sequence
  SAMD9 targeting guide sequence portion
guagccagcuuauuacacua

SEQ ID NO: 13337 - RNA, 20 nt, Artificial Sequence
  SAMD9 targeting guide sequence portion
guagugggguucuguguagc

SEQ ID NO: 13338 - RNA, 20 nt, Artificial Sequence
  SAMD9 targeting guide sequence portion
guaucaugugcuuggcacuc

SEQ ID NO: 13339 - RNA, 20 nt, Artificial Sequence
  SAMD9 targeting guide sequence portion
guaucuauaaccuugccggu

SEQ ID NO: 13340 - RNA, 20 nt, Artificial Sequence
  SAMD9 targeting guide sequence portion
guauuuaauuuccucuuaaa

SEQ ID NO: 13341 - RNA, 20 nt, Artificial Sequence
  SAMD9 targeting guide sequence portion
gucaggagaaguuaguguaa

SEQ ID NO: 13342 - RNA, 20 nt, Artificial Sequence
  SAMD9 targeting guide sequence portion
gucauagcuccuuauuauuu

SEQ ID NO: 13343 - RNA, 20 nt, Artificial Sequence
  SAMD9 targeting guide sequence portion
gucaucaaugauguuaacca

SEQ ID NO: 13344 - RNA, 20 nt, Artificial Sequence
  SAMD9 targeting guide sequence portion
guccucuguuuuggaagauc

SEQ ID NO: 13345 - RNA, 20 nt, Artificial Sequence
  SAMD9 targeting guide sequence portion
gucuaaaugccauuugagua

SEQ ID NO: 13346 - RNA, 20 nt, Artificial Sequence
  SAMD9 targeting guide sequence portion
gucuacucaaauggcauuua

SEQ ID NO: 13347 - RNA, 20 nt, Artificial Sequence
  SAMD9 targeting guide sequence portion
gucugggaaaauauuucuca

SEQ ID NO: 13348 - RNA, 20 nt, Artificial Sequence
  SAMD9 targeting guide sequence portion
gucuuugagaaauauuuucc

SEQ ID NO: 13349 - RNA, 20 nt, Artificial Sequence
  SAMD9 targeting guide sequence portion
gucuuuguagaacucauaac

SEQ ID NO: 13350 - RNA, 20 nt, Artificial Sequence
  SAMD9 targeting guide sequence portion
gugaaaaaggaaggagugag

SEQ ID NO: 13351 - RNA, 20 nt, Artificial Sequence
  SAMD9 targeting guide sequence portion
gugagauauaugaaaaguag

SEQ ID NO: 13352 - RNA, 20 nt, Artificial Sequence
  SAMD9 targeting guide sequence portion
gugccaagcacaugauacau

SEQ ID NO: 13353 - RNA, 20 nt, Artificial Sequence
  SAMD9 targeting guide sequence portion
gugcuuggcacucaaggauc

SEQ ID NO: 13354 - RNA, 20 nt, Artificial Sequence
  SAMD9 targeting guide sequence portion
gugggguucuguguagccag

SEQ ID NO: 13355 - RNA, 20 nt, Artificial Sequence
  SAMD9 targeting guide sequence portion
guguaauaagcuggcuacac

SEQ ID NO: 13356 - RNA, 20 nt, Artificial Sequence
  SAMD9 targeting guide sequence portion
guguagccagcuuauuacac

SEQ ID NO: 13357 - RNA, 20 nt, Artificial Sequence
  SAMD9 targeting guide sequence portion
guuaacaucauugaugacaa

SEQ ID NO: 13358 - RNA, 20 nt, Artificial Sequence
  SAMD9 targeting guide sequence portion
guuaaccaaaccaaggaaca

SEQ ID NO: 13359 - RNA, 20 nt, Artificial Sequence
  SAMD9 targeting guide sequence portion
guuaguguaauaagcuggcu

SEQ ID NO: 13360 - RNA, 20 nt, Artificial Sequence
  SAMD9 targeting guide sequence portion
guuauagauacagccucuag

SEQ ID NO: 13361 - RNA, 20 nt, Artificial Sequence
  SAMD9 targeting guide sequence portion
guuaugaguucuacaaagac

SEQ ID NO: 13362 - RNA, 20 nt, Artificial Sequence
  SAMD9 targeting guide sequence portion
guuccuugguuugguuaaca

SEQ ID NO: 13363 - RNA, 20 nt, Artificial Sequence
  SAMD9 targeting guide sequence portion
guucuacaaagacaauagug

SEQ ID NO: 13364 - RNA, 20 nt, Artificial Sequence
  SAMD9 targeting guide sequence portion
guucuguguagccagcuuau

SEQ ID NO: 13365 - RNA, 20 nt, Artificial Sequence
  SAMD9 targeting guide sequence portion
guugcuccucaguuugagag

SEQ ID NO: 13366 - RNA, 20 nt, Artificial Sequence
  SAMD9 targeting guide sequence portion
guuuaaagcauagaucuuga

SEQ ID NO: 13367 - RNA, 20 nt, Artificial Sequence
  SAMD9 targeting guide sequence portion
guuuaagaggaaauuaaaua

SEQ ID NO: 13368 - RNA, 20 nt, Artificial Sequence
  SAMD9 targeting guide sequence portion
guuugagagguuuuugcugu

SEQ ID NO: 13369 - RNA, 20 nt, Artificial Sequence
  SAMD9 targeting guide sequence portion
guuugguuaacaucauugau

SEQ ID NO: 13370 - RNA, 20 nt, Artificial Sequence
  SAMD9 targeting guide sequence portion
guuuuggaagauccuugagu

SEQ ID NO: 13371 - RNA, 20 nt, Artificial Sequence
  SAMD9 targeting guide sequence portion
guuuuugcugucuuugagaa

SEQ ID NO: 13372 - RNA, 20 nt, Artificial Sequence
  SAMD9 targeting guide sequence portion
uaaacauguuaugaguucua

SEQ ID NO: 13373 - RNA, 20 nt, Artificial Sequence
  SAMD9 targeting guide sequence portion
uaaaccggcaagguuauaga

SEQ ID NO: 13374 - RNA, 20 nt, Artificial Sequence
  SAMD9 targeting guide sequence portion
uaaagcauagaucuugaguc

SEQ ID NO: 13375 - RNA, 20 nt, Artificial Sequence
  SAMD9 targeting guide sequence portion
uaaauacugcauguacagau

SEQ ID NO: 13376 - RNA, 20 nt, Artificial Sequence
  SAMD9 targeting guide sequence portion
uaaaugccauuugaguagac

SEQ ID NO: 13377 - RNA, 20 nt, Artificial Sequence
  SAMD9 targeting guide sequence portion
uaaauggguacugagaucaa

SEQ ID NO: 13378 - RNA, 20 nt, Artificial Sequence
  SAMD9 targeting guide sequence portion
uaaauguugcuccucaguuu

SEQ ID NO: 13379 - RNA, 20 nt, Artificial Sequence
  SAMD9 targeting guide sequence portion
uaaccaaaccaaggaacaua

SEQ ID NO: 13380 - RNA, 20 nt, Artificial Sequence
  SAMD9 targeting guide sequence portion
uaaccuugccgguuuaaagc

SEQ ID NO: 13381 - RNA, 20 nt, Artificial Sequence
  SAMD9 targeting guide sequence portion
uaacuucuccugacuccagu

SEQ ID NO: 13382 - RNA, 20 nt, Artificial Sequence
  SAMD9 targeting guide sequence portion
uaagaauaaauguugcuccu

SEQ ID NO: 13383 - RNA, 20 nt, Artificial Sequence
  SAMD9 targeting guide sequence portion
uaagaggaaauuaaauacug

SEQ ID NO: 13384 - RNA, 20 nt, Artificial Sequence
  SAMD9 targeting guide sequence portion
uaagcagaucaucaauguau

SEQ ID NO: 13385 - RNA, 20 nt, Artificial Sequence
  SAMD9 targeting guide sequence portion
uaagcuggcuacacagaacc

SEQ ID NO: 13386 - RNA, 20 nt, Artificial Sequence
  SAMD9 targeting guide sequence portion
uaaggagcuaugacuggagu

SEQ ID NO: 13387 - RNA, 20 nt, Artificial Sequence
  SAMD9 targeting guide sequence portion
uaaguagugggguucugugu

SEQ ID NO: 13388 - RNA, 20 nt, Artificial Sequence
  SAMD9 targeting guide sequence portion
uaauaagcuggcuacacaga

SEQ ID NO: 13389 - RNA, 20 nt, Artificial Sequence
  SAMD9 targeting guide sequence portion
uaauaaggagcuaugacugg

SEQ ID NO: 13390 - RNA, 20 nt, Artificial Sequence
  SAMD9 targeting guide sequence portion
uaaugucuaaaugccauuug

SEQ ID NO: 13391 - RNA, 20 nt, Artificial Sequence
  SAMD9 targeting guide sequence portion
uaauuuccucuuaaacaugu

SEQ ID NO: 13392 - RNA, 20 nt, Artificial Sequence
  SAMD9 targeting guide sequence portion
uacaaagacaauagugaaaa

SEQ ID NO: 13393 - RNA, 20 nt, Artificial Sequence
  SAMD9 targeting guide sequence portion
uacacagaaccccacuacuu

SEQ ID NO: 13394 - RNA, 20 nt, Artificial Sequence
  SAMD9 targeting guide sequence portion
uacacuaacuucuccugacu

SEQ ID NO: 13395 - RNA, 20 nt, Artificial Sequence
  SAMD9 targeting guide sequence portion
uacagaucugaagagcuaga

SEQ ID NO: 13396 - RNA, 20 nt, Artificial Sequence
  SAMD9 targeting guide sequence portion
uacagccucuagcucuucag

SEQ ID NO: 13397 - RNA, 20 nt, Artificial Sequence
  SAMD9 targeting guide sequence portion
uacaugcaguauuuaauuuc

SEQ ID NO: 13398 - RNA, 20 nt, Artificial Sequence
  SAMD9 targeting guide sequence portion
uacauugaugaucugcuuag

SEQ ID NO: 13399 - RNA, 20 nt, Artificial Sequence
  SAMD9 targeting guide sequence portion
uaccaggcauggauugaaga

SEQ ID NO: 13400 - RNA, 20 nt, Artificial Sequence
  SAMD9 targeting guide sequence portion
uacuaagcagaucaucaaug

SEQ ID NO: 13401 - RNA, 20 nt, Artificial Sequence
  SAMD9 targeting guide sequence portion
uacucaaauggcauuuagac

SEQ ID NO: 13402 - RNA, 20 nt, Artificial Sequence
  SAMD9 targeting guide sequence portion
uacugagaucaaauucuugg

SEQ ID NO: 13403 - RNA, 20 nt, Artificial Sequence
  SAMD9 targeting guide sequence portion
uacugcauguacagaucuga

SEQ ID NO: 13404 - RNA, 20 nt, Artificial Sequence
  SAMD9 targeting guide sequence portion
uacuuaccaggcauggauug

SEQ ID NO: 13405 - RNA, 20 nt, Artificial Sequence
  SAMD9 targeting guide sequence portion
uacuuuucauauaucucacu

SEQ ID NO: 13406 - RNA, 20 nt, Artificial Sequence
  SAMD9 targeting guide sequence portion
uagaacucauaacauguuua

SEQ ID NO: 13407 - RNA, 20 nt, Artificial Sequence
  SAMD9 targeting guide sequence portion
uagaaugucugggaaaauau

SEQ ID NO: 13408 - RNA, 20 nt, Artificial Sequence
  SAMD9 targeting guide sequence portion
uagacaaucuucuucaaucc

SEQ ID NO: 13409 - RNA, 20 nt, Artificial Sequence
  SAMD9 targeting guide sequence portion
uagacauuagaaugucuggg

SEQ ID NO: 13410 - RNA, 20 nt, Artificial Sequence
  SAMD9 targeting guide sequence portion
uagaggcuguaucuauaacc

SEQ ID NO: 13411 - RNA, 20 nt, Artificial Sequence
  SAMD9 targeting guide sequence portion
uagauacagccucuagcucu

SEQ ID NO: 13412 - RNA, 20 nt, Artificial Sequence
  SAMD9 targeting guide sequence portion
uagcaaauauguuccuuggu

SEQ ID NO: 13413 - RNA, 20 nt, Artificial Sequence
  SAMD9 targeting guide sequence portion
uagccagcuuauuacacuaa

SEQ ID NO: 13414 - RNA, 20 nt, Artificial Sequence
  SAMD9 targeting guide sequence portion
uagcuccuuauuauuuuguc

SEQ ID NO: 13415 - RNA, 20 nt, Artificial Sequence
  SAMD9 targeting guide sequence portion
uagcucuucagaucuguaca

SEQ ID NO: 13416 - RNA, 20 nt, Artificial Sequence
  SAMD9 targeting guide sequence portion
uaguaagaauaaauguugcu

SEQ ID NO: 13417 - RNA, 20 nt, Artificial Sequence
  SAMD9 targeting guide sequence portion
uagugaaaaaggaaggagug

SEQ ID NO: 13418 - RNA, 20 nt, Artificial Sequence
  SAMD9 targeting guide sequence portion
uagugggguucuguguagcc

SEQ ID NO: 13419 - RNA, 20 nt, Artificial Sequence
  SAMD9 targeting guide sequence portion
uaguguaauaagcuggcuac

SEQ ID NO: 13420 - RNA, 20 nt, Artificial Sequence
  SAMD9 targeting guide sequence portion
uauaaccuugccgguuuaaa

SEQ ID NO: 13421 - RNA, 20 nt, Artificial Sequence
  SAMD9 targeting guide sequence portion
uauagauacagccucuagcu

SEQ ID NO: 13422 - RNA, 20 nt, Artificial Sequence
  SAMD9 targeting guide sequence portion
uauaucucacuccuuccuuu

SEQ ID NO: 13423 - RNA, 20 nt, Artificial Sequence
  SAMD9 targeting guide sequence portion
uauaugaaaaguagcaaaua

SEQ ID NO: 13424 - RNA, 20 nt, Artificial Sequence
  SAMD9 targeting guide sequence portion
uaucaugugcuuggcacuca

SEQ ID NO: 13425 - RNA, 20 nt, Artificial Sequence
  SAMD9 targeting guide sequence portion
uaucuauaaccuugccgguu

SEQ ID NO: 13426 - RNA, 20 nt, Artificial Sequence
  SAMD9 targeting guide sequence portion
uaucucacuccuuccuuuuu

SEQ ID NO: 13427 - RNA, 20 nt, Artificial Sequence
  SAMD9 targeting guide sequence portion
uaugaaaaguagcaaauaug

SEQ ID NO: 13428 - RNA, 20 nt, Artificial Sequence
  SAMD9 targeting guide sequence portion
uaugacuggagucaggagaa

SEQ ID NO: 13429 - RNA, 20 nt, Artificial Sequence
  SAMD9 targeting guide sequence portion
uaugaguucuacaaagacaa

SEQ ID NO: 13430 - RNA, 20 nt, Artificial Sequence
  SAMD9 targeting guide sequence portion
uaugcuuuaaaccggcaagg

SEQ ID NO: 13431 - RNA, 20 nt, Artificial Sequence
  SAMD9 targeting guide sequence portion
uauguuccuugguuugguua

SEQ ID NO: 13432 - RNA, 20 nt, Artificial Sequence
  SAMD9 targeting guide sequence portion
uauuacacuaacuucuccug

SEQ ID NO: 13433 - RNA, 20 nt, Artificial Sequence
  SAMD9 targeting guide sequence portion
uauucuuacuaagcagauca

SEQ ID NO: 13434 - RNA, 20 nt, Artificial Sequence
  SAMD9 targeting guide sequence portion
uauucuuccuccaagaauuu

SEQ ID NO: 13435 - RNA, 20 nt, Artificial Sequence
  SAMD9 targeting guide sequence portion
uauugucuuuguagaacuca

SEQ ID NO: 13436 - RNA, 20 nt, Artificial Sequence
  SAMD9 targeting guide sequence portion
uauuucucaaagacagcaaa

SEQ ID NO: 13437 - RNA, 20 nt, Artificial Sequence
  SAMD9 targeting guide sequence portion
uauuugcuacuuuucauaua

SEQ ID NO: 13438 - RNA, 20 nt, Artificial Sequence
  SAMD9 targeting guide sequence portion
uauuuucccagacauucuaa

SEQ ID NO: 13439 - RNA, 20 nt, Artificial Sequence
  SAMD9 targeting guide sequence portion
uauuuugucaucaaugaugu

SEQ ID NO: 13440 - RNA, 20 nt, Artificial Sequence
  SAMD9 targeting guide sequence portion
ucaaacugaggagcaacauu

SEQ ID NO: 13441 - RNA, 20 nt, Artificial Sequence
  SAMD9 targeting guide sequence portion
ucaaagacagcaaaaaccuc

SEQ ID NO: 13442 - RNA, 20 nt, Artificial Sequence
  SAMD9 targeting guide sequence portion
ucaaauggcauuuagacauu

SEQ ID NO: 13443 - RNA, 20 nt, Artificial Sequence
  SAMD9 targeting guide sequence portion
ucaaauucuuggaggaagaa

SEQ ID NO: 13444 - RNA, 20 nt, Artificial Sequence
  SAMD9 targeting guide sequence portion
ucaagaucuaugcuuuaaac

SEQ ID NO: 13445 - RNA, 20 nt, Artificial Sequence
  SAMD9 targeting guide sequence portion
ucaauccaugccugguaagu

SEQ ID NO: 13446 - RNA, 20 nt, Artificial Sequence
  SAMD9 targeting guide sequence portion
ucaaugauguuaaccaaacc

SEQ ID NO: 13447 - RNA, 20 nt, Artificial Sequence
  SAMD9 targeting guide sequence portion
ucaauguaucaugugcuugg

SEQ ID NO: 13448 - RNA, 20 nt, Artificial Sequence
  SAMD9 targeting guide sequence portion
ucacuauugucuuuguagaa

SEQ ID NO: 13449 - RNA, 20 nt, Artificial Sequence
  SAMD9 targeting guide sequence portion
ucacuccuuccuuuuucacu

SEQ ID NO: 13450 - RNA, 20 nt, Artificial Sequence
  SAMD9 targeting guide sequence portion
ucagaucuguacaugcagua

SEQ ID NO: 13451 - RNA, 20 nt, Artificial Sequence
  SAMD9 targeting guide sequence portion
ucaggagaaguuaguguaau

SEQ ID NO: 13452 - RNA, 20 nt, Artificial Sequence
  SAMD9 targeting guide sequence portion
ucaguuugagagguuuuugc

SEQ ID NO: 13453 - RNA, 20 nt, Artificial Sequence
  SAMD9 targeting guide sequence portion
ucauaacauguuuaagagga

SEQ ID NO: 13454 - RNA, 20 nt, Artificial Sequence
  SAMD9 targeting guide sequence portion
ucauagcuccuuauuauuuu

SEQ ID NO: 13455 - RNA, 20 nt, Artificial Sequence
  SAMD9 targeting guide sequence portion
ucauauaucucacuccuucc

SEQ ID NO: 13456 - RNA, 20 nt, Artificial Sequence
  SAMD9 targeting guide sequence portion
ucaucaaugauguuaaccaa

SEQ ID NO: 13457 - RNA, 20 nt, Artificial Sequence
  SAMD9 targeting guide sequence portion
ucaucaauguaucaugugcu

SEQ ID NO: 13458 - RNA, 20 nt, Artificial Sequence
  SAMD9 targeting guide sequence portion
ucaugugcuuggcacucaag

SEQ ID NO: 13459 - RNA, 20 nt, Artificial Sequence
  SAMD9 targeting guide sequence portion
ucauugaugacaaaauaaua

SEQ ID NO: 13460 - RNA, 20 nt, Artificial Sequence
  SAMD9 targeting guide sequence portion
uccaagaauuugaucucagu

SEQ ID NO: 13461 - RNA, 20 nt, Artificial Sequence
  SAMD9 targeting guide sequence portion
uccagucauagcuccuuauu

SEQ ID NO: 13462 - RNA, 20 nt, Artificial Sequence
  SAMD9 targeting guide sequence portion
uccaugccugguaaguagug

SEQ ID NO: 13463 - RNA, 20 nt, Artificial Sequence
  SAMD9 targeting guide sequence portion
ucccagacauucuaaugucu

SEQ ID NO: 13464 - RNA, 20 nt, Artificial Sequence
  SAMD9 targeting guide sequence portion
uccucaguuugagagguuuu

SEQ ID NO: 13465 - RNA, 20 nt, Artificial Sequence
  SAMD9 targeting guide sequence portion
uccuccaagaauuugaucuc

SEQ ID NO: 13466 - RNA, 20 nt, Artificial Sequence
  SAMD9 targeting guide sequence portion
uccucuguuuuggaagaucc

SEQ ID NO: 13467 - RNA, 20 nt, Artificial Sequence
  SAMD9 targeting guide sequence portion
uccucuuaaacauguuauga

SEQ ID NO: 13468 - RNA, 20 nt, Artificial Sequence
  SAMD9 targeting guide sequence portion
uccugacuccagucauagcu

SEQ ID NO: 13469 - RNA, 20 nt, Artificial Sequence
  SAMD9 targeting guide sequence portion
uccuuauuauuuugucauca

SEQ ID NO: 13470 - RNA, 20 nt, Artificial Sequence
  SAMD9 targeting guide sequence portion
uccuuccuuuuucacuauug

SEQ ID NO: 13471 - RNA, 20 nt, Artificial Sequence
  SAMD9 targeting guide sequence portion
uccuugagugccaagcacau

SEQ ID NO: 13472 - RNA, 20 nt, Artificial Sequence
  SAMD9 targeting guide sequence portion
uccuugguuugguuaacauc

SEQ ID NO: 13473 - RNA, 20 nt, Artificial Sequence
  SAMD9 targeting guide sequence portion
uccuuuuucacuauugucuu

SEQ ID NO: 13474 - RNA, 20 nt, Artificial Sequence
  SAMD9 targeting guide sequence portion
ucuaaaugccauuugaguag

SEQ ID NO: 13475 - RNA, 20 nt, Artificial Sequence
  SAMD9 targeting guide sequence portion
ucuaaugucuaaaugccauu

SEQ ID NO: 13476 - RNA, 20 nt, Artificial Sequence
  SAMD9 targeting guide sequence portion
ucuacaaagacaauagugaa

SEQ ID NO: 13477 - RNA, 20 nt, Artificial Sequence
  SAMD9 targeting guide sequence portion
ucuacucaaauggcauuuag

SEQ ID NO: 13478 - RNA, 20 nt, Artificial Sequence
  SAMD9 targeting guide sequence portion
ucuagcucuucagaucugua

SEQ ID NO: 13479 - RNA, 20 nt, Artificial Sequence
  SAMD9 targeting guide sequence portion
ucuauaaccuugccgguuua

SEQ ID NO: 13480 - RNA, 20 nt, Artificial Sequence
  SAMD9 targeting guide sequence portion
ucuaugcuuuaaaccggcaa

SEQ ID NO: 13481 - RNA, 20 nt, Artificial Sequence
  SAMD9 targeting guide sequence portion
ucucaaacugaggagcaaca

SEQ ID NO: 13482 - RNA, 20 nt, Artificial Sequence
  SAMD9 targeting guide sequence portion
ucucaaagacagcaaaaacc

SEQ ID NO: 13483 - RNA, 20 nt, Artificial Sequence
  SAMD9 targeting guide sequence portion
ucucacuccuuccuuuuuca

SEQ ID NO: 13484 - RNA, 20 nt, Artificial Sequence
  SAMD9 targeting guide sequence portion
ucuccugacuccagucauag

SEQ ID NO: 13485 - RNA, 20 nt, Artificial Sequence
  SAMD9 targeting guide sequence portion
ucugaagagcuagaggcugu

SEQ ID NO: 13486 - RNA, 20 nt, Artificial Sequence
  SAMD9 targeting guide sequence portion
ucugcuuaguaagaauaaau

SEQ ID NO: 13487 - RNA, 20 nt, Artificial Sequence
  SAMD9 targeting guide sequence portion
ucugggaaaauauuucucaa

SEQ ID NO: 13488 - RNA, 20 nt, Artificial Sequence
  SAMD9 targeting guide sequence portion
ucuguacaugcaguauuuaa

SEQ ID NO: 13489 - RNA, 20 nt, Artificial Sequence
  SAMD9 targeting guide sequence portion
ucuguguagccagcuuauua

SEQ ID NO: 13490 - RNA, 20 nt, Artificial Sequence
  SAMD9 targeting guide sequence portion
ucuguuuuggaagauccuug

SEQ ID NO: 13491 - RNA, 20 nt, Artificial Sequence
  SAMD9 targeting guide sequence portion
ucuuaaacauguuaugaguu

SEQ ID NO: 13492 - RNA, 20 nt, Artificial Sequence
  SAMD9 targeting guide sequence portion
ucuuacuaagcagaucauca

SEQ ID NO: 13493 - RNA, 20 nt, Artificial Sequence
  SAMD9 targeting guide sequence portion
ucuucaauccaugccuggua

SEQ ID NO: 13494 - RNA, 20 nt, Artificial Sequence
  SAMD9 targeting guide sequence portion
ucuucagaucuguacaugca

SEQ ID NO: 13495 - RNA, 20 nt, Artificial Sequence
  SAMD9 targeting guide sequence portion
ucuuccuccaagaauuugau

SEQ ID NO: 13496 - RNA, 20 nt, Artificial Sequence
  SAMD9 targeting guide sequence portion
ucuucuucaauccaugccug

SEQ ID NO: 13497 - RNA, 20 nt, Artificial Sequence
  SAMD9 targeting guide sequence portion
ucuuugagaaauauuuuccc

SEQ ID NO: 13498 - RNA, 20 nt, Artificial Sequence
  SAMD9 targeting guide sequence portion
ucuuuguagaacucauaaca

SEQ ID NO: 13499 - RNA, 20 nt, Artificial Sequence
  SAMD9 targeting guide sequence portion
ugaaaaaggaaggagugaga

SEQ ID NO: 13500 - RNA, 20 nt, Artificial Sequence
  SAMD9 targeting guide sequence portion
ugaaaaguagcaaauauguu

SEQ ID NO: 13501 - RNA, 20 nt, Artificial Sequence
  SAMD9 targeting guide sequence portion
ugaagaagauugucuacuca

SEQ ID NO: 13502 - RNA, 20 nt, Artificial Sequence
  SAMD9 targeting guide sequence portion
ugaagagcuagaggcuguau

SEQ ID NO: 13503 - RNA, 20 nt, Artificial Sequence
  SAMD9 targeting guide sequence portion
ugacaaaauaauaaggagcu

SEQ ID NO: 13504 - RNA, 20 nt, Artificial Sequence
  SAMD9 targeting guide sequence portion
ugacuccagucauagcuccu

SEQ ID NO: 13505 - RNA, 20 nt, Artificial Sequence
  SAMD9 targeting guide sequence portion
ugacuggagucaggagaagu

SEQ ID NO: 13506 - RNA, 20 nt, Artificial Sequence
  SAMD9 targeting guide sequence portion
ugagaaauauuuucccagac

SEQ ID NO: 13507 - RNA, 20 nt, Artificial Sequence
  SAMD9 targeting guide sequence portion
ugagagguuuuugcugucuu

SEQ ID NO: 13508 - RNA, 20 nt, Artificial Sequence
  SAMD9 targeting guide sequence portion
ugagauauaugaaaaguagc

SEQ ID NO: 13509 - RNA, 20 nt, Artificial Sequence
  SAMD9 targeting guide sequence portion
ugagaucaaauucuuggagg

SEQ ID NO: 13510 - RNA, 20 nt, Artificial Sequence
  SAMD9 targeting guide sequence portion
ugaggagcaacauuuauucu

SEQ ID NO: 13511 - RNA, 20 nt, Artificial Sequence
  SAMD9 targeting guide sequence portion
ugaguagacaaucuucuuca

SEQ ID NO: 13512 - RNA, 20 nt, Artificial Sequence
  SAMD9 targeting guide sequence portion
ugagugccaagcacaugaua

SEQ ID NO: 13513 - RNA, 20 nt, Artificial Sequence
  SAMD9 targeting guide sequence portion
ugaguucuacaaagacaaua

SEQ ID NO: 13514 - RNA, 20 nt, Artificial Sequence
  SAMD9 targeting guide sequence portion
ugauacauugaugaucugcu

SEQ ID NO: 13515 - RNA, 20 nt, Artificial Sequence
  SAMD9 targeting guide sequence portion
ugauauucuuccuccaagaa

SEQ ID NO: 13516 - RNA, 20 nt, Artificial Sequence
  SAMD9 targeting guide sequence portion
ugaucucaguacccauuuaa

SEQ ID NO: 13517 - RNA, 20 nt, Artificial Sequence
  SAMD9 targeting guide sequence portion
ugaucugcuuaguaagaaua

SEQ ID NO: 13518 - RNA, 20 nt, Artificial Sequence
  SAMD9 targeting guide sequence portion
ugaugacaaaauaauaagga

SEQ ID NO: 13519 - RNA, 20 nt, Artificial Sequence
  SAMD9 targeting guide sequence portion
ugaugaucugcuuaguaaga

SEQ ID NO: 13520 - RNA, 20 nt, Artificial Sequence
  SAMD9 targeting guide sequence portion
ugauguuaaccaaaccaagg

SEQ ID NO: 13521 - RNA, 20 nt, Artificial Sequence
  SAMD9 targeting guide sequence portion
ugcaguauuuaauuuccucu

SEQ ID NO: 13522 - RNA, 20 nt, Artificial Sequence
  SAMD9 targeting guide sequence portion
ugcauguacagaucugaaga

SEQ ID NO: 13523 - RNA, 20 nt, Artificial Sequence
  SAMD9 targeting guide sequence portion
ugccaagcacaugauacauu

SEQ ID NO: 13524 - RNA, 20 nt, Artificial Sequence
  SAMD9 targeting guide sequence portion
ugccauuugaguagacaauc

SEQ ID NO: 13525 - RNA, 20 nt, Artificial Sequence
  SAMD9 targeting guide sequence portion
ugccgguuuaaagcauagau

SEQ ID NO: 13526 - RNA, 20 nt, Artificial Sequence
  SAMD9 targeting guide sequence portion
ugccugguaaguaguggggu

SEQ ID NO: 13527 - RNA, 20 nt, Artificial Sequence
  SAMD9 targeting guide sequence portion
ugcuacuuuucauauaucuc

SEQ ID NO: 13528 - RNA, 20 nt, Artificial Sequence
  SAMD9 targeting guide sequence portion
ugcuccucaguuugagaggu

SEQ ID NO: 13529 - RNA, 20 nt, Artificial Sequence
  SAMD9 targeting guide sequence portion
ugcugucuuugagaaauauu

SEQ ID NO: 13530 - RNA, 20 nt, Artificial Sequence
  SAMD9 targeting guide sequence portion
ugcuuaguaagaauaaaugu

SEQ ID NO: 13531 - RNA, 20 nt, Artificial Sequence
  SAMD9 targeting guide sequence portion
ugcuuggcacucaaggaucu

SEQ ID NO: 13532 - RNA, 20 nt, Artificial Sequence
  SAMD9 targeting guide sequence portion
ugcuuuaaaccggcaagguu

SEQ ID NO: 13533 - RNA, 20 nt, Artificial Sequence
  SAMD9 targeting guide sequence portion
uggaagauccuugagugcca

SEQ ID NO: 13534 - RNA, 20 nt, Artificial Sequence
  SAMD9 targeting guide sequence portion
uggacucaagaucuaugcuu

SEQ ID NO: 13535 - RNA, 20 nt, Artificial Sequence
  SAMD9 targeting guide sequence portion
uggagucaggagaaguuagu

SEQ ID NO: 13536 - RNA, 20 nt, Artificial Sequence
  SAMD9 targeting guide sequence portion
uggauugaagaagauugucu

SEQ ID NO: 13537 - RNA, 20 nt, Artificial Sequence
  SAMD9 targeting guide sequence portion
uggcacucaaggaucuucca

SEQ ID NO: 13538 - RNA, 20 nt, Artificial Sequence
  SAMD9 targeting guide sequence portion
uggcauuuagacauuagaau

SEQ ID NO: 13539 - RNA, 20 nt, Artificial Sequence
  SAMD9 targeting guide sequence portion
uggcuacacagaaccccacu

SEQ ID NO: 13540 - RNA, 20 nt, Artificial Sequence
  SAMD9 targeting guide sequence portion
ugggaaaauauuucucaaag

SEQ ID NO: 13541 - RNA, 20 nt, Artificial Sequence
  SAMD9 targeting guide sequence portion
ugggguucuguguagccagc

SEQ ID NO: 13542 - RNA, 20 nt, Artificial Sequence
  SAMD9 targeting guide sequence portion
uggguacugagaucaaauuc

SEQ ID NO: 13543 - RNA, 20 nt, Artificial Sequence
  SAMD9 targeting guide sequence portion
ugguaaguagugggguucug

SEQ ID NO: 13544 - RNA, 20 nt, Artificial Sequence
  SAMD9 targeting guide sequence portion
ugguuaacaucauugaugac

SEQ ID NO: 13545 - RNA, 20 nt, Artificial Sequence
  SAMD9 targeting guide sequence portion
ugguuugguuaacaucauug

SEQ ID NO: 13546 - RNA, 20 nt, Artificial Sequence
  SAMD9 targeting guide sequence portion
uguaauaagcuggcuacaca

SEQ ID NO: 13547 - RNA, 20 nt, Artificial Sequence
  SAMD9 targeting guide sequence portion
uguacagaucugaagagcua

SEQ ID NO: 13548 - RNA, 20 nt, Artificial Sequence
  SAMD9 targeting guide sequence portion
uguacaugcaguauuuaauu

SEQ ID NO: 13549 - RNA, 20 nt, Artificial Sequence
  SAMD9 targeting guide sequence portion
uguagaacucauaacauguu

SEQ ID NO: 13550 - RNA, 20 nt, Artificial Sequence
  SAMD9 targeting guide sequence portion
uguagccagcuuauuacacu

SEQ ID NO: 13551 - RNA, 20 nt, Artificial Sequence
  SAMD9 targeting guide sequence portion
uguaucaugugcuuggcacu

SEQ ID NO: 13552 - RNA, 20 nt, Artificial Sequence
  SAMD9 targeting guide sequence portion
uguaucuauaaccuugccgg

SEQ ID NO: 13553 - RNA, 20 nt, Artificial Sequence
  SAMD9 targeting guide sequence portion
ugucaucaaugauguuaacc

SEQ ID NO: 13554 - RNA, 20 nt, Artificial Sequence
  SAMD9 targeting guide sequence portion
ugucuaaaugccauuugagu

SEQ ID NO: 13555 - RNA, 20 nt, Artificial Sequence
  SAMD9 targeting guide sequence portion
ugucuacucaaauggcauuu

SEQ ID NO: 13556 - RNA, 20 nt, Artificial Sequence
  SAMD9 targeting guide sequence portion
ugucugggaaaauauuucuc

SEQ ID NO: 13557 - RNA, 20 nt, Artificial Sequence
  SAMD9 targeting guide sequence portion
ugucuuugagaaauauuuuc

SEQ ID NO: 13558 - RNA, 20 nt, Artificial Sequence
  SAMD9 targeting guide sequence portion
ugucuuuguagaacucauaa

SEQ ID NO: 13559 - RNA, 20 nt, Artificial Sequence
  SAMD9 targeting guide sequence portion
ugugcuuggcacucaaggau

SEQ ID NO: 13560 - RNA, 20 nt, Artificial Sequence
  SAMD9 targeting guide sequence portion
uguguagccagcuuauuaca

SEQ ID NO: 13561 - RNA, 20 nt, Artificial Sequence
  SAMD9 targeting guide sequence portion
uguuaaccaaaccaaggaac

SEQ ID NO: 13562 - RNA, 20 nt, Artificial Sequence
  SAMD9 targeting guide sequence portion
uguuaugaguucuacaaaga

SEQ ID NO: 13563 - RNA, 20 nt, Artificial Sequence
  SAMD9 targeting guide sequence portion
uguuccuugguuugguuaac

SEQ ID NO: 13564 - RNA, 20 nt, Artificial Sequence
  SAMD9 targeting guide sequence portion
uguugcuccucaguuugaga

SEQ ID NO: 13565 - RNA, 20 nt, Artificial Sequence
  SAMD9 targeting guide sequence portion
uguuuaagaggaaauuaaau

SEQ ID NO: 13566 - RNA, 20 nt, Artificial Sequence
  SAMD9 targeting guide sequence portion
uguuuuggaagauccuugag

SEQ ID NO: 13567 - RNA, 20 nt, Artificial Sequence
  SAMD9 targeting guide sequence portion
uuaaacauguuaugaguucu

SEQ ID NO: 13568 - RNA, 20 nt, Artificial Sequence
  SAMD9 targeting guide sequence portion
uuaaaccggcaagguuauag

SEQ ID NO: 13569 - RNA, 20 nt, Artificial Sequence
  SAMD9 targeting guide sequence portion
uuaaagcauagaucuugagu

SEQ ID NO: 13570 - RNA, 20 nt, Artificial Sequence
  SAMD9 targeting guide sequence portion
uuaaauacugcauguacaga

SEQ ID NO: 13571 - RNA, 20 nt, Artificial Sequence
  SAMD9 targeting guide sequence portion
uuaaauggguacugagauca

SEQ ID NO: 13572 - RNA, 20 nt, Artificial Sequence
  SAMD9 targeting guide sequence portion
uuaaccaaaccaaggaacau

SEQ ID NO: 13573 - RNA, 20 nt, Artificial Sequence
  SAMD9 targeting guide sequence portion
uuaagaggaaauuaaauacu

SEQ ID NO: 13574 - RNA, 20 nt, Artificial Sequence
  SAMD9 targeting guide sequence portion
uuaauuuccucuuaaacaug

SEQ ID NO: 13575 - RNA, 20 nt, Artificial Sequence
  SAMD9 targeting guide sequence portion
uuacacuaacuucuccugac

SEQ ID NO: 13576 - RNA, 20 nt, Artificial Sequence
  SAMD9 targeting guide sequence portion
uuaccaggcauggauugaag

SEQ ID NO: 13577 - RNA, 20 nt, Artificial Sequence
  SAMD9 targeting guide sequence portion
uuacuaagcagaucaucaau

SEQ ID NO: 13578 - RNA, 20 nt, Artificial Sequence
  SAMD9 targeting guide sequence portion
uuagaaugucugggaaaaua

SEQ ID NO: 13579 - RNA, 20 nt, Artificial Sequence
  SAMD9 targeting guide sequence portion
uuagacauuagaaugucugg

SEQ ID NO: 13580 - RNA, 20 nt, Artificial Sequence
  SAMD9 targeting guide sequence portion
uuaguaagaauaaauguugc

SEQ ID NO: 13581 - RNA, 20 nt, Artificial Sequence
  SAMD9 targeting guide sequence portion
uuaguguaauaagcuggcua

SEQ ID NO: 13582 - RNA, 20 nt, Artificial Sequence
  SAMD9 targeting guide sequence portion
uuauagauacagccucuagc

SEQ ID NO: 13583 - RNA, 20 nt, Artificial Sequence
  SAMD9 targeting guide sequence portion
uuaugaguucuacaaagaca

SEQ ID NO: 13584 - RNA, 20 nt, Artificial Sequence
  SAMD9 targeting guide sequence portion
uuauuacacuaacuucuccu

SEQ ID NO: 13585 - RNA, 20 nt, Artificial Sequence
  SAMD9 targeting guide sequence portion
uuauucuuacuaagcagauc

SEQ ID NO: 13586 - RNA, 20 nt, Artificial Sequence
  SAMD9 targeting guide sequence portion
uuauuuugucaucaaugaug

SEQ ID NO: 13587 - RNA, 20 nt, Artificial Sequence
  SAMD9 targeting guide sequence portion
uucaauccaugccugguaag

SEQ ID NO: 13588 - RNA, 20 nt, Artificial Sequence
  SAMD9 targeting guide sequence portion
uucacuauugucuuuguaga

SEQ ID NO: 13589 - RNA, 20 nt, Artificial Sequence
  SAMD9 targeting guide sequence portion
uucagaucuguacaugcagu

SEQ ID NO: 13590 - RNA, 20 nt, Artificial Sequence
  SAMD9 targeting guide sequence portion
uucauauaucucacuccuuc

SEQ ID NO: 13591 - RNA, 20 nt, Artificial Sequence
  SAMD9 targeting guide sequence portion
uucccagacauucuaauguc

SEQ ID NO: 13592 - RNA, 20 nt, Artificial Sequence
  SAMD9 targeting guide sequence portion
uuccuccaagaauuugaucu

SEQ ID NO: 13593 - RNA, 20 nt, Artificial Sequence
  SAMD9 targeting guide sequence portion
uuccucuuaaacauguuaug

SEQ ID NO: 13594 - RNA, 20 nt, Artificial Sequence
  SAMD9 targeting guide sequence portion
uuccuugguuugguuaacau

SEQ ID NO: 13595 - RNA, 20 nt, Artificial Sequence
  SAMD9 targeting guide sequence portion
uuccuuuuucacuauugucu

SEQ ID NO: 13596 - RNA, 20 nt, Artificial Sequence
  SAMD9 targeting guide sequence portion
uucuaaugucuaaaugccau

SEQ ID NO: 13597 - RNA, 20 nt, Artificial Sequence
  SAMD9 targeting guide sequence portion
uucuacaaagacaauaguga

SEQ ID NO: 13598 - RNA, 20 nt, Artificial Sequence
  SAMD9 targeting guide sequence portion
uucucaaagacagcaaaaac

SEQ ID NO: 13599 - RNA, 20 nt, Artificial Sequence
  SAMD9 targeting guide sequence portion
uucuccugacuccagucaua

SEQ ID NO: 13600 - RNA, 20 nt, Artificial Sequence
  SAMD9 targeting guide sequence portion
uucuguguagccagcuuauu

SEQ ID NO: 13601 - RNA, 20 nt, Artificial Sequence
  SAMD9 targeting guide sequence portion
uucuuacuaagcagaucauc

SEQ ID NO: 13602 - RNA, 20 nt, Artificial Sequence
  SAMD9 targeting guide sequence portion
uucuucaauccaugccuggu

SEQ ID NO: 13603 - RNA, 20 nt, Artificial Sequence
  SAMD9 targeting guide sequence portion
uucuuccuccaagaauuuga

SEQ ID NO: 13604 - RNA, 20 nt, Artificial Sequence
  SAMD9 targeting guide sequence portion
uugaagaagauugucuacuc

SEQ ID NO: 13605 - RNA, 20 nt, Artificial Sequence
  SAMD9 targeting guide sequence portion
uugagaaauauuuucccaga

SEQ ID NO: 13606 - RNA, 20 nt, Artificial Sequence
  SAMD9 targeting guide sequence portion
uugagagguuuuugcugucu

SEQ ID NO: 13607 - RNA, 20 nt, Artificial Sequence
  SAMD9 targeting guide sequence portion
uugaguagacaaucuucuuc

SEQ ID NO: 13608 - RNA, 20 nt, Artificial Sequence
  SAMD9 targeting guide sequence portion
uugagugccaagcacaugau

SEQ ID NO: 13609 - RNA, 20 nt, Artificial Sequence
  SAMD9 targeting guide sequence portion
uugaucucaguacccauuua

SEQ ID NO: 13610 - RNA, 20 nt, Artificial Sequence
  SAMD9 targeting guide sequence portion
uugaugacaaaauaauaagg

SEQ ID NO: 13611 - RNA, 20 nt, Artificial Sequence
  SAMD9 targeting guide sequence portion
uugaugaucugcuuaguaag

SEQ ID NO: 13612 - RNA, 20 nt, Artificial Sequence
  SAMD9 targeting guide sequence portion
uugccgguuuaaagcauaga

SEQ ID NO: 13613 - RNA, 20 nt, Artificial Sequence
  SAMD9 targeting guide sequence portion
uugcuacuuuucauauaucu

SEQ ID NO: 13614 - RNA, 20 nt, Artificial Sequence
  SAMD9 targeting guide sequence portion
uugcuccucaguuugagagg

SEQ ID NO: 13615 - RNA, 20 nt, Artificial Sequence
  SAMD9 targeting guide sequence portion
uugcugucuuugagaaauau

SEQ ID NO: 13616 - RNA, 20 nt, Artificial Sequence
  SAMD9 targeting guide sequence portion
uuggaagauccuugagugcc

SEQ ID NO: 13617 - RNA, 20 nt, Artificial Sequence
  SAMD9 targeting guide sequence portion
uuggacucaagaucuaugcu

SEQ ID NO: 13618 - RNA, 20 nt, Artificial Sequence
  SAMD9 targeting guide sequence portion
uuggcacucaaggaucuucc

SEQ ID NO: 13619 - RNA, 20 nt, Artificial Sequence
  SAMD9 targeting guide sequence portion
uugguuaacaucauugauga

SEQ ID NO: 13620 - RNA, 20 nt, Artificial Sequence
  SAMD9 targeting guide sequence portion
uugguuugguuaacaucauu

SEQ ID NO: 13621 - RNA, 20 nt, Artificial Sequence
  SAMD9 targeting guide sequence portion
uuguagaacucauaacaugu

SEQ ID NO: 13622 - RNA, 20 nt, Artificial Sequence
  SAMD9 targeting guide sequence portion
uugucaucaaugauguuaac

SEQ ID NO: 13623 - RNA, 20 nt, Artificial Sequence
  SAMD9 targeting guide sequence portion
uugucuacucaaauggcauu

SEQ ID NO: 13624 - RNA, 20 nt, Artificial Sequence
  SAMD9 targeting guide sequence portion
uugucuuuguagaacucaua

SEQ ID NO: 13625 - RNA, 20 nt, Artificial Sequence
  SAMD9 targeting guide sequence portion
uuuaaaccggcaagguuaua

SEQ ID NO: 13626 - RNA, 20 nt, Artificial Sequence
  SAMD9 targeting guide sequence portion
uuuaaagcauagaucuugag

SEQ ID NO: 13627 - RNA, 20 nt, Artificial Sequence
  SAMD9 targeting guide sequence portion
uuuaagaggaaauuaaauac

SEQ ID NO: 13628 - RNA, 20 nt, Artificial Sequence
  SAMD9 targeting guide sequence portion
uuuaauuuccucuuaaacau

SEQ ID NO: 13629 - RNA, 20 nt, Artificial Sequence
  SAMD9 targeting guide sequence portion
uuuagacauuagaaugucug

SEQ ID NO: 13630 - RNA, 20 nt, Artificial Sequence
  SAMD9 targeting guide sequence portion
uuuauucuuacuaagcagau

SEQ ID NO: 13631 - RNA, 20 nt, Artificial Sequence
  SAMD9 targeting guide sequence portion
uuucacuauugucuuuguag

SEQ ID NO: 13632 - RNA, 20 nt, Artificial Sequence
  SAMD9 targeting guide sequence portion
uuucauauaucucacuccuu

SEQ ID NO: 13633 - RNA, 20 nt, Artificial Sequence
  SAMD9 targeting guide sequence portion
uuucccagacauucuaaugu

SEQ ID NO: 13634 - RNA, 20 nt, Artificial Sequence
  SAMD9 targeting guide sequence portion
uuuccucuuaaacauguuau

SEQ ID NO: 13635 - RNA, 20 nt, Artificial Sequence
  SAMD9 targeting guide sequence portion
uuucucaaagacagcaaaaa

SEQ ID NO: 13636 - RNA, 20 nt, Artificial Sequence
  SAMD9 targeting guide sequence portion
uuugagaaauauuuucccag

SEQ ID NO: 13637 - RNA, 20 nt, Artificial Sequence
  SAMD9 targeting guide sequence portion
uuugagagguuuuugcuguc

SEQ ID NO: 13638 - RNA, 20 nt, Artificial Sequence
  SAMD9 targeting guide sequence portion
uuugaguagacaaucuucuu

SEQ ID NO: 13639 - RNA, 20 nt, Artificial Sequence
  SAMD9 targeting guide sequence portion
uuugaucucaguacccauuu

SEQ ID NO: 13640 - RNA, 20 nt, Artificial Sequence
  SAMD9 targeting guide sequence portion
uuugcuacuuuucauauauc

SEQ ID NO: 13641 - RNA, 20 nt, Artificial Sequence
  SAMD9 targeting guide sequence portion
uuugcugucuuugagaaaua

SEQ ID NO: 13642 - RNA, 20 nt, Artificial Sequence
  SAMD9 targeting guide sequence portion
uuuggaagauccuugagugc

SEQ ID NO: 13643 - RNA, 20 nt, Artificial Sequence
  SAMD9 targeting guide sequence portion
uuuggacucaagaucuaugc

SEQ ID NO: 13644 - RNA, 20 nt, Artificial Sequence
  SAMD9 targeting guide sequence portion
uuugguuaacaucauugaug

SEQ ID NO: 13645 - RNA, 20 nt, Artificial Sequence
  SAMD9 targeting guide sequence portion
uuuguagaacucauaacaug

SEQ ID NO: 13646 - RNA, 20 nt, Artificial Sequence
  SAMD9 targeting guide sequence portion
uuugucaucaaugauguuaa

SEQ ID NO: 13647 - RNA, 20 nt, Artificial Sequence
  SAMD9 targeting guide sequence portion
uuuucacuauugucuuugua

SEQ ID NO: 13648 - RNA, 20 nt, Artificial Sequence
  SAMD9 targeting guide sequence portion
uuuucauauaucucacuccu

SEQ ID NO: 13649 - RNA, 20 nt, Artificial Sequence
  SAMD9 targeting guide sequence portion
uuuucccagacauucuaaug

SEQ ID NO: 13650 - RNA, 20 nt, Artificial Sequence
  SAMD9 targeting guide sequence portion
uuuugcugucuuugagaaau

SEQ ID NO: 13651 - RNA, 20 nt, Artificial Sequence
  SAMD9 targeting guide sequence portion
uuuuggaagauccuugagug

SEQ ID NO: 13652 - RNA, 20 nt, Artificial Sequence
  SAMD9 targeting guide sequence portion
uuuuggacucaagaucuaug

SEQ ID NO: 13653 - RNA, 20 nt, Artificial Sequence
  SAMD9 targeting guide sequence portion
uuuugucaucaaugauguua

SEQ ID NO: 13654 - RNA, 20 nt, Artificial Sequence
  SAMD9 targeting guide sequence portion
uuuuucacuauugucuuugu

SEQ ID NO: 13655 - RNA, 20 nt, Artificial Sequence
  SAMD9 targeting guide sequence portion
uuuuugcugucuuugagaaa

SEQ ID NO: 13656 - RNA, 20 nt, Artificial Sequence
  SAMD9 targeting guide sequence portion
uuuuuggacucaagaucuau

SEQ ID NO: 13657 - RNA, 20 nt, Artificial Sequence
  SAMD9 targeting guide sequence portion
uuuuuuggacucaagaucua

SEQ ID NO: 13658 - RNA, 21 nt, Artificial Sequence
  SAMD9 targeting guide sequence portion
aaaaaauuaaauggguacuga

SEQ ID NO: 13659 - RNA, 21 nt, Artificial Sequence
  SAMD9 targeting guide sequence portion
aaaaaccucucaaacugagga

SEQ ID NO: 13660 - RNA, 21 nt, Artificial Sequence
  SAMD9 targeting guide sequence portion
aaaaaggaaggagugagauau

SEQ ID NO: 13661 - RNA, 21 nt, Artificial Sequence
  SAMD9 targeting guide sequence portion
aaaaauuaaauggguacugag

SEQ ID NO: 13662 - RNA, 21 nt, Artificial Sequence
  SAMD9 targeting guide sequence portion
aaaaccucucaaacugaggag

SEQ ID NO: 13663 - RNA, 21 nt, Artificial Sequence
  SAMD9 targeting guide sequence portion
aaaaggaaggagugagauaua

SEQ ID NO: 13664 - RNA, 21 nt, Artificial Sequence
  SAMD9 targeting guide sequence portion
aaaaguagcaaauauguuccu

SEQ ID NO: 13665 - RNA, 21 nt, Artificial Sequence
  SAMD9 targeting guide sequence portion
aaaauaauaaggagcuaugac

SEQ ID NO: 13666 - RNA, 21 nt, Artificial Sequence
  SAMD9 targeting guide sequence portion
aaaauauuucucaaagacagc

SEQ ID NO: 13667 - RNA, 21 nt, Artificial Sequence
  SAMD9 targeting guide sequence portion
aaaauuaaauggguacugaga

SEQ ID NO: 13668 - RNA, 21 nt, Artificial Sequence
  SAMD9 targeting guide sequence portion
aaacauguuaugaguucuaca

SEQ ID NO: 13669 - RNA, 21 nt, Artificial Sequence
  SAMD9 targeting guide sequence portion
aaaccaaggaacauauuugcu

SEQ ID NO: 13670 - RNA, 21 nt, Artificial Sequence
  SAMD9 targeting guide sequence portion
aaaccggcaagguuauagaua

SEQ ID NO: 13671 - RNA, 21 nt, Artificial Sequence
  SAMD9 targeting guide sequence portion
aaaccucucaaacugaggagc

SEQ ID NO: 13672 - RNA, 21 nt, Artificial Sequence
  SAMD9 targeting guide sequence portion
aaacugaggagcaacauuuau

SEQ ID NO: 13673 - RNA, 21 nt, Artificial Sequence
  SAMD9 targeting guide sequence portion
aaagacaauagugaaaaagga

SEQ ID NO: 13674 - RNA, 21 nt, Artificial Sequence
  SAMD9 targeting guide sequence portion
aaagacagcaaaaaccucuca

SEQ ID NO: 13675 - RNA, 21 nt, Artificial Sequence
  SAMD9 targeting guide sequence portion
aaaggaaggagugagauauau

SEQ ID NO: 13676 - RNA, 21 nt, Artificial Sequence
  SAMD9 targeting guide sequence portion
aaaguagcaaauauguuccuu

SEQ ID NO: 13677 - RNA, 21 nt, Artificial Sequence
  SAMD9 targeting guide sequence portion
aaauaauaaggagcuaugacu

SEQ ID NO: 13678 - RNA, 21 nt, Artificial Sequence
  SAMD9 targeting guide sequence portion
aaauacugcauguacagaucu

SEQ ID NO: 13679 - RNA, 21 nt, Artificial Sequence
  SAMD9 targeting guide sequence portion
aaauauguuccuugguuuggu

SEQ ID NO: 13680 - RNA, 21 nt, Artificial Sequence
  SAMD9 targeting guide sequence portion
aaauauuucucaaagacagca

SEQ ID NO: 13681 - RNA, 21 nt, Artificial Sequence
  SAMD9 targeting guide sequence portion
aaauauuuucccagacauucu

SEQ ID NO: 13682 - RNA, 21 nt, Artificial Sequence
  SAMD9 targeting guide sequence portion
aaaugccauuugaguagacaa

SEQ ID NO: 13683 - RNA, 21 nt, Artificial Sequence
  SAMD9 targeting guide sequence portion
aaauggcauuuagacauuaga

SEQ ID NO: 13684 - RNA, 21 nt, Artificial Sequence
  SAMD9 targeting guide sequence portion
aaauggguacugagaucaaau

SEQ ID NO: 13685 - RNA, 21 nt, Artificial Sequence
  SAMD9 targeting guide sequence portion
aaauguugcuccucaguuuga

SEQ ID NO: 13686 - RNA, 21 nt, Artificial Sequence
  SAMD9 targeting guide sequence portion
aaauuaaauacugcauguaca

SEQ ID NO: 13687 - RNA, 21 nt, Artificial Sequence
  SAMD9 targeting guide sequence portion
aaauuaaauggguacugagau

SEQ ID NO: 13688 - RNA, 21 nt, Artificial Sequence
  SAMD9 targeting guide sequence portion
aaauucuuggaggaagaauau

SEQ ID NO: 13689 - RNA, 21 nt, Artificial Sequence
  SAMD9 targeting guide sequence portion
aacauauuugcuacuuuucau

SEQ ID NO: 13690 - RNA, 21 nt, Artificial Sequence
  SAMD9 targeting guide sequence portion
aacaucauugaugacaaaaua

SEQ ID NO: 13691 - RNA, 21 nt, Artificial Sequence
  SAMD9 targeting guide sequence portion
aacauguuaugaguucuacaa

SEQ ID NO: 13692 - RNA, 21 nt, Artificial Sequence
  SAMD9 targeting guide sequence portion
aacauguuuaagaggaaauua

SEQ ID NO: 13693 - RNA, 21 nt, Artificial Sequence
  SAMD9 targeting guide sequence portion
aacauuuauucuuacuaagca

SEQ ID NO: 13694 - RNA, 21 nt, Artificial Sequence
  SAMD9 targeting guide sequence portion
aaccaaaccaaggaacauauu

SEQ ID NO: 13695 - RNA, 21 nt, Artificial Sequence
  SAMD9 targeting guide sequence portion
aaccaaggaacauauuugcua

SEQ ID NO: 13696 - RNA, 21 nt, Artificial Sequence
  SAMD9 targeting guide sequence portion
aaccccacuacuuaccaggca

SEQ ID NO: 13697 - RNA, 21 nt, Artificial Sequence
  SAMD9 targeting guide sequence portion
aaccggcaagguuauagauac

SEQ ID NO: 13698 - RNA, 21 nt, Artificial Sequence
  SAMD9 targeting guide sequence portion
aaccucucaaacugaggagca

SEQ ID NO: 13699 - RNA, 21 nt, Artificial Sequence
  SAMD9 targeting guide sequence portion
aaccuugccgguuuaaagcau

SEQ ID NO: 13700 - RNA, 21 nt, Artificial Sequence
  SAMD9 targeting guide sequence portion
aacucauaacauguuuaagag

SEQ ID NO: 13701 - RNA, 21 nt, Artificial Sequence
  SAMD9 targeting guide sequence portion
aacugaggagcaacauuuauu

SEQ ID NO: 13702 - RNA, 21 nt, Artificial Sequence
  SAMD9 targeting guide sequence portion
aacuucuccugacuccaguca

SEQ ID NO: 13703 - RNA, 21 nt, Artificial Sequence
  SAMD9 targeting guide sequence portion
aagaagauugucuacucaaau

SEQ ID NO: 13704 - RNA, 21 nt, Artificial Sequence
  SAMD9 targeting guide sequence portion
aagaauaaauguugcuccuca

SEQ ID NO: 13705 - RNA, 21 nt, Artificial Sequence
  SAMD9 targeting guide sequence portion
aagaauuugaucucaguaccc

SEQ ID NO: 13706 - RNA, 21 nt, Artificial Sequence
  SAMD9 targeting guide sequence portion
aagacaauagugaaaaaggaa

SEQ ID NO: 13707 - RNA, 21 nt, Artificial Sequence
  SAMD9 targeting guide sequence portion
aagacagcaaaaaccucucaa

SEQ ID NO: 13708 - RNA, 21 nt, Artificial Sequence
  SAMD9 targeting guide sequence portion
aagagcuagaggcuguaucua

SEQ ID NO: 13709 - RNA, 21 nt, Artificial Sequence
  SAMD9 targeting guide sequence portion
aagaggaaauuaaauacugca

SEQ ID NO: 13710 - RNA, 21 nt, Artificial Sequence
  SAMD9 targeting guide sequence portion
aagauccuugagugccaagca

SEQ ID NO: 13711 - RNA, 21 nt, Artificial Sequence
  SAMD9 targeting guide sequence portion
aagaucuaugcuuuaaaccgg

SEQ ID NO: 13712 - RNA, 21 nt, Artificial Sequence
  SAMD9 targeting guide sequence portion
aagauugucuacucaaauggc

SEQ ID NO: 13713 - RNA, 21 nt, Artificial Sequence
  SAMD9 targeting guide sequence portion
aagcacaugauacauugauga

SEQ ID NO: 13714 - RNA, 21 nt, Artificial Sequence
  SAMD9 targeting guide sequence portion
aagcagaucaucaauguauca

SEQ ID NO: 13715 - RNA, 21 nt, Artificial Sequence
  SAMD9 targeting guide sequence portion
aagcuggcuacacagaacccc

SEQ ID NO: 13716 - RNA, 21 nt, Artificial Sequence
  SAMD9 targeting guide sequence portion
aaggaacauauuugcuacuuu

SEQ ID NO: 13717 - RNA, 21 nt, Artificial Sequence
  SAMD9 targeting guide sequence portion
aaggaaggagugagauauaug

SEQ ID NO: 13718 - RNA, 21 nt, Artificial Sequence
  SAMD9 targeting guide sequence portion
aaggagcuaugacuggaguca

SEQ ID NO: 13719 - RNA, 21 nt, Artificial Sequence
  SAMD9 targeting guide sequence portion
aaggagugagauauaugaaaa

SEQ ID NO: 13720 - RNA, 21 nt, Artificial Sequence
  SAMD9 targeting guide sequence portion
aagguuauagauacagccucu

SEQ ID NO: 13721 - RNA, 21 nt, Artificial Sequence
  SAMD9 targeting guide sequence portion
aaguagcaaauauguuccuug

SEQ ID NO: 13722 - RNA, 21 nt, Artificial Sequence
  SAMD9 targeting guide sequence portion
aaguagugggguucuguguag

SEQ ID NO: 13723 - RNA, 21 nt, Artificial Sequence
  SAMD9 targeting guide sequence portion
aaguuaguguaauaagcuggc

SEQ ID NO: 13724 - RNA, 21 nt, Artificial Sequence
  SAMD9 targeting guide sequence portion
aauaaauguugcuccucaguu

SEQ ID NO: 13725 - RNA, 21 nt, Artificial Sequence
  SAMD9 targeting guide sequence portion
aauaagcuggcuacacagaac

SEQ ID NO: 13726 - RNA, 21 nt, Artificial Sequence
  SAMD9 targeting guide sequence portion
aauaaggagcuaugacuggag

SEQ ID NO: 13727 - RNA, 21 nt, Artificial Sequence
  SAMD9 targeting guide sequence portion
aauaauaaggagcuaugacug

SEQ ID NO: 13728 - RNA, 21 nt, Artificial Sequence
  SAMD9 targeting guide sequence portion
aauacugcauguacagaucug

SEQ ID NO: 13729 - RNA, 21 nt, Artificial Sequence
  SAMD9 targeting guide sequence portion
aauagugaaaaaggaaggagu

SEQ ID NO: 13730 - RNA, 21 nt, Artificial Sequence
  SAMD9 targeting guide sequence portion
aauauguuccuugguuugguu

SEQ ID NO: 13731 - RNA, 21 nt, Artificial Sequence
  SAMD9 targeting guide sequence portion
aauauuucucaaagacagcaa

SEQ ID NO: 13732 - RNA, 21 nt, Artificial Sequence
  SAMD9 targeting guide sequence portion
aauauuuucccagacauucua

SEQ ID NO: 13733 - RNA, 21 nt, Artificial Sequence
  SAMD9 targeting guide sequence portion
aauccaugccugguaaguagu

SEQ ID NO: 13734 - RNA, 21 nt, Artificial Sequence
  SAMD9 targeting guide sequence portion
aaucuucuucaauccaugccu

SEQ ID NO: 13735 - RNA, 21 nt, Artificial Sequence
  SAMD9 targeting guide sequence portion
aaugauguuaaccaaaccaag

SEQ ID NO: 13736 - RNA, 21 nt, Artificial Sequence
  SAMD9 targeting guide sequence portion
aaugccauuugaguagacaau

SEQ ID NO: 13737 - RNA, 21 nt, Artificial Sequence
  SAMD9 targeting guide sequence portion
aauggcauuuagacauuagaa

SEQ ID NO: 13738 - RNA, 21 nt, Artificial Sequence
  SAMD9 targeting guide sequence portion
aauggguacugagaucaaauu

SEQ ID NO: 13739 - RNA, 21 nt, Artificial Sequence
  SAMD9 targeting guide sequence portion
aauguaucaugugcuuggcac

SEQ ID NO: 13740 - RNA, 21 nt, Artificial Sequence
  SAMD9 targeting guide sequence portion
aaugucuaaaugccauuugag

SEQ ID NO: 13741 - RNA, 21 nt, Artificial Sequence
  SAMD9 targeting guide sequence portion
aaugucugggaaaauauuucu

SEQ ID NO: 13742 - RNA, 21 nt, Artificial Sequence
  SAMD9 targeting guide sequence portion
aauguugcuccucaguuugag

SEQ ID NO: 13743 - RNA, 21 nt, Artificial Sequence
  SAMD9 targeting guide sequence portion
aauuaaauacugcauguacag

SEQ ID NO: 13744 - RNA, 21 nt, Artificial Sequence
  SAMD9 targeting guide sequence portion
aauuaaauggguacugagauc

SEQ ID NO: 13745 - RNA, 21 nt, Artificial Sequence
  SAMD9 targeting guide sequence portion
aauucuuggaggaagaauauc

SEQ ID NO: 13746 - RNA, 21 nt, Artificial Sequence
  SAMD9 targeting guide sequence portion
aauuuccucuuaaacauguua

SEQ ID NO: 13747 - RNA, 21 nt, Artificial Sequence
  SAMD9 targeting guide sequence portion
aauuugaucucaguacccauu

SEQ ID NO: 13748 - RNA, 21 nt, Artificial Sequence
  SAMD9 targeting guide sequence portion
acaaaauaauaaggagcuaug

SEQ ID NO: 13749 - RNA, 21 nt, Artificial Sequence
  SAMD9 targeting guide sequence portion
acaaagacaauagugaaaaag

SEQ ID NO: 13750 - RNA, 21 nt, Artificial Sequence
  SAMD9 targeting guide sequence portion
acaauagugaaaaaggaagga

SEQ ID NO: 13751 - RNA, 21 nt, Artificial Sequence
  SAMD9 targeting guide sequence portion
acaaucuucuucaauccaugc

SEQ ID NO: 13752 - RNA, 21 nt, Artificial Sequence
  SAMD9 targeting guide sequence portion
acacagaaccccacuacuuac

SEQ ID NO: 13753 - RNA, 21 nt, Artificial Sequence
  SAMD9 targeting guide sequence portion
acacuaacuucuccugacucc

SEQ ID NO: 13754 - RNA, 21 nt, Artificial Sequence
  SAMD9 targeting guide sequence portion
acagaaccccacuacuuacca

SEQ ID NO: 13755 - RNA, 21 nt, Artificial Sequence
  SAMD9 targeting guide sequence portion
acagaucugaagagcuagagg

SEQ ID NO: 13756 - RNA, 21 nt, Artificial Sequence
  SAMD9 targeting guide sequence portion
acagcaaaaaccucucaaacu

SEQ ID NO: 13757 - RNA, 21 nt, Artificial Sequence
  SAMD9 targeting guide sequence portion
acagccucuagcucuucagau

SEQ ID NO: 13758 - RNA, 21 nt, Artificial Sequence
  SAMD9 targeting guide sequence portion
acauauuugcuacuuuucaua

SEQ ID NO: 13759 - RNA, 21 nt, Artificial Sequence
  SAMD9 targeting guide sequence portion
acaucauugaugacaaaauaa

SEQ ID NO: 13760 - RNA, 21 nt, Artificial Sequence
  SAMD9 targeting guide sequence portion
acaugauacauugaugaucug

SEQ ID NO: 13761 - RNA, 21 nt, Artificial Sequence
  SAMD9 targeting guide sequence portion
acaugcaguauuuaauuuccu

SEQ ID NO: 13762 - RNA, 21 nt, Artificial Sequence
  SAMD9 targeting guide sequence portion
acauguuaugaguucuacaaa

SEQ ID NO: 13763 - RNA, 21 nt, Artificial Sequence
  SAMD9 targeting guide sequence portion
acauguuuaagaggaaauuaa

SEQ ID NO: 13764 - RNA, 21 nt, Artificial Sequence
  SAMD9 targeting guide sequence portion
acauuagaaugucugggaaaa

SEQ ID NO: 13765 - RNA, 21 nt, Artificial Sequence
  SAMD9 targeting guide sequence portion
acauucuaaugucuaaaugcc

SEQ ID NO: 13766 - RNA, 21 nt, Artificial Sequence
  SAMD9 targeting guide sequence portion
acauugaugaucugcuuagua

SEQ ID NO: 13767 - RNA, 21 nt, Artificial Sequence
  SAMD9 targeting guide sequence portion
acauuuauucuuacuaagcag

SEQ ID NO: 13768 - RNA, 21 nt, Artificial Sequence
  SAMD9 targeting guide sequence portion
accaaaccaaggaacauauuu

SEQ ID NO: 13769 - RNA, 21 nt, Artificial Sequence
  SAMD9 targeting guide sequence portion
accaaggaacauauuugcuac

SEQ ID NO: 13770 - RNA, 21 nt, Artificial Sequence
  SAMD9 targeting guide sequence portion
accaggcauggauugaagaag

SEQ ID NO: 13771 - RNA, 21 nt, Artificial Sequence
  SAMD9 targeting guide sequence portion
accccacuacuuaccaggcau

SEQ ID NO: 13772 - RNA, 21 nt, Artificial Sequence
  SAMD9 targeting guide sequence portion
accggcaagguuauagauaca

SEQ ID NO: 13773 - RNA, 21 nt, Artificial Sequence
  SAMD9 targeting guide sequence portion
accucucaaacugaggagcaa

SEQ ID NO: 13774 - RNA, 21 nt, Artificial Sequence
  SAMD9 targeting guide sequence portion
accuugccgguuuaaagcaua

SEQ ID NO: 13775 - RNA, 21 nt, Artificial Sequence
  SAMD9 targeting guide sequence portion
acuaacuucuccugacuccag

SEQ ID NO: 13776 - RNA, 21 nt, Artificial Sequence
  SAMD9 targeting guide sequence portion
acuaagcagaucaucaaugua

SEQ ID NO: 13777 - RNA, 21 nt, Artificial Sequence
  SAMD9 targeting guide sequence portion
acuacuuaccaggcauggauu

SEQ ID NO: 13778 - RNA, 21 nt, Artificial Sequence
  SAMD9 targeting guide sequence portion
acuauugucuuuguagaacuc

SEQ ID NO: 13779 - RNA, 21 nt, Artificial Sequence
  SAMD9 targeting guide sequence portion
acucaaauggcauuuagacau

SEQ ID NO: 13780 - RNA, 21 nt, Artificial Sequence
  SAMD9 targeting guide sequence portion
acucaagaucuaugcuuuaaa

SEQ ID NO: 13781 - RNA, 21 nt, Artificial Sequence
  SAMD9 targeting guide sequence portion
acucaaggaucuuccaaaaca

SEQ ID NO: 13782 - RNA, 21 nt, Artificial Sequence
  SAMD9 targeting guide sequence portion
acucauaacauguuuaagagg

SEQ ID NO: 13783 - RNA, 21 nt, Artificial Sequence
  SAMD9 targeting guide sequence portion
acuccagucauagcuccuuau

SEQ ID NO: 13784 - RNA, 21 nt, Artificial Sequence
  SAMD9 targeting guide sequence portion
acuccuuccuuuuucacuauu

SEQ ID NO: 13785 - RNA, 21 nt, Artificial Sequence
  SAMD9 targeting guide sequence portion
acugagaucaaauucuuggag

SEQ ID NO: 13786 - RNA, 21 nt, Artificial Sequence
  SAMD9 targeting guide sequence portion
acugaggagcaacauuuauuc

SEQ ID NO: 13787 - RNA, 21 nt, Artificial Sequence
  SAMD9 targeting guide sequence portion
acugcauguacagaucugaag

SEQ ID NO: 13788 - RNA, 21 nt, Artificial Sequence
  SAMD9 targeting guide sequence portion
acuggagucaggagaaguuag

SEQ ID NO: 13789 - RNA, 21 nt, Artificial Sequence
  SAMD9 targeting guide sequence portion
acuuaccaggcauggauugaa

SEQ ID NO: 13790 - RNA, 21 nt, Artificial Sequence
  SAMD9 targeting guide sequence portion
acuucuccugacuccagucau

SEQ ID NO: 13791 - RNA, 21 nt, Artificial Sequence
  SAMD9 targeting guide sequence portion
acuuuucauauaucucacucc

SEQ ID NO: 13792 - RNA, 21 nt, Artificial Sequence
  SAMD9 targeting guide sequence portion
agaaauauuuucccagacauu

SEQ ID NO: 13793 - RNA, 21 nt, Artificial Sequence
  SAMD9 targeting guide sequence portion
agaaccccacuacuuaccagg

SEQ ID NO: 13794 - RNA, 21 nt, Artificial Sequence
  SAMD9 targeting guide sequence portion
agaacucauaacauguuuaag

SEQ ID NO: 13795 - RNA, 21 nt, Artificial Sequence
  SAMD9 targeting guide sequence portion
agaagauugucuacucaaaug

SEQ ID NO: 13796 - RNA, 21 nt, Artificial Sequence
  SAMD9 targeting guide sequence portion
agaaguuaguguaauaagcug

SEQ ID NO: 13797 - RNA, 21 nt, Artificial Sequence
  SAMD9 targeting guide sequence portion
agaauaaauguugcuccucag

SEQ ID NO: 13798 - RNA, 21 nt, Artificial Sequence
  SAMD9 targeting guide sequence portion
agaaugucugggaaaauauuu

SEQ ID NO: 13799 - RNA, 21 nt, Artificial Sequence
  SAMD9 targeting guide sequence portion
agaauuugaucucaguaccca

SEQ ID NO: 13800 - RNA, 21 nt, Artificial Sequence
  SAMD9 targeting guide sequence portion
agacaauagugaaaaaggaag

SEQ ID NO: 13801 - RNA, 21 nt, Artificial Sequence
  SAMD9 targeting guide sequence portion
agacaaucuucuucaauccau

SEQ ID NO: 13802 - RNA, 21 nt, Artificial Sequence
  SAMD9 targeting guide sequence portion
agacagcaaaaaccucucaaa

SEQ ID NO: 13803 - RNA, 21 nt, Artificial Sequence
  SAMD9 targeting guide sequence portion
agacauuagaaugucugggaa

SEQ ID NO: 13804 - RNA, 21 nt, Artificial Sequence
  SAMD9 targeting guide sequence portion
agacauucuaaugucuaaaug

SEQ ID NO: 13805 - RNA, 21 nt, Artificial Sequence
  SAMD9 targeting guide sequence portion
agagcuagaggcuguaucuau

SEQ ID NO: 13806 - RNA, 21 nt, Artificial Sequence
  SAMD9 targeting guide sequence portion
agaggaaauuaaauacugcau

SEQ ID NO: 13807 - RNA, 21 nt, Artificial Sequence
  SAMD9 targeting guide sequence portion
agaggcuguaucuauaaccuu

SEQ ID NO: 13808 - RNA, 21 nt, Artificial Sequence
  SAMD9 targeting guide sequence portion
agagguuuuugcugucuuuga

SEQ ID NO: 13809 - RNA, 21 nt, Artificial Sequence
  SAMD9 targeting guide sequence portion
agauacagccucuagcucuuc

SEQ ID NO: 13810 - RNA, 21 nt, Artificial Sequence
  SAMD9 targeting guide sequence portion
agauauaugaaaaguagcaaa

SEQ ID NO: 13811 - RNA, 21 nt, Artificial Sequence
  SAMD9 targeting guide sequence portion
agaucaaauucuuggaggaag

SEQ ID NO: 13812 - RNA, 21 nt, Artificial Sequence
  SAMD9 targeting guide sequence portion
agaucaucaauguaucaugug

SEQ ID NO: 13813 - RNA, 21 nt, Artificial Sequence
  SAMD9 targeting guide sequence portion
agauccuugagugccaagcac

SEQ ID NO: 13814 - RNA, 21 nt, Artificial Sequence
  SAMD9 targeting guide sequence portion
agaucuaugcuuuaaaccggc

SEQ ID NO: 13815 - RNA, 21 nt, Artificial Sequence
  SAMD9 targeting guide sequence portion
agaucugaagagcuagaggcu

SEQ ID NO: 13816 - RNA, 21 nt, Artificial Sequence
  SAMD9 targeting guide sequence portion
agaucuguacaugcaguauuu

SEQ ID NO: 13817 - RNA, 21 nt, Artificial Sequence
  SAMD9 targeting guide sequence portion
agauugucuacucaaauggca

SEQ ID NO: 13818 - RNA, 21 nt, Artificial Sequence
  SAMD9 targeting guide sequence portion
agcaaaaaccucucaaacuga

SEQ ID NO: 13819 - RNA, 21 nt, Artificial Sequence
  SAMD9 targeting guide sequence portion
agcaaauauguuccuugguuu

SEQ ID NO: 13820 - RNA, 21 nt, Artificial Sequence
  SAMD9 targeting guide sequence portion
agcaacauuuauucuuacuaa

SEQ ID NO: 13821 - RNA, 21 nt, Artificial Sequence
  SAMD9 targeting guide sequence portion
agcacaugauacauugaugau

SEQ ID NO: 13822 - RNA, 21 nt, Artificial Sequence
  SAMD9 targeting guide sequence portion
agcagaucaucaauguaucau

SEQ ID NO: 13823 - RNA, 21 nt, Artificial Sequence
  SAMD9 targeting guide sequence portion
agccagcuuauuacacuaacu

SEQ ID NO: 13824 - RNA, 21 nt, Artificial Sequence
  SAMD9 targeting guide sequence portion
agccucuagcucuucagaucu

SEQ ID NO: 13825 - RNA, 21 nt, Artificial Sequence
  SAMD9 targeting guide sequence portion
agccugauauucuuccuccaa

SEQ ID NO: 13826 - RNA, 21 nt, Artificial Sequence
  SAMD9 targeting guide sequence portion
agcuagaggcuguaucuauaa

SEQ ID NO: 13827 - RNA, 21 nt, Artificial Sequence
  SAMD9 targeting guide sequence portion
agcuaugacuggagucaggag

SEQ ID NO: 13828 - RNA, 21 nt, Artificial Sequence
  SAMD9 targeting guide sequence portion
agcuccuuauuauuuugucau

SEQ ID NO: 13829 - RNA, 21 nt, Artificial Sequence
  SAMD9 targeting guide sequence portion
agcucuucagaucuguacaug

SEQ ID NO: 13830 - RNA, 21 nt, Artificial Sequence
  SAMD9 targeting guide sequence portion
agcuggcuacacagaacccca

SEQ ID NO: 13831 - RNA, 21 nt, Artificial Sequence
  SAMD9 targeting guide sequence portion
agcuuauuacacuaacuucuc

SEQ ID NO: 13832 - RNA, 21 nt, Artificial Sequence
  SAMD9 targeting guide sequence portion
aggaaauuaaauacugcaugu

SEQ ID NO: 13833 - RNA, 21 nt, Artificial Sequence
  SAMD9 targeting guide sequence portion
aggaacauauuugcuacuuuu

SEQ ID NO: 13834 - RNA, 21 nt, Artificial Sequence
  SAMD9 targeting guide sequence portion
aggaaggagugagauauauga

SEQ ID NO: 13835 - RNA, 21 nt, Artificial Sequence
  SAMD9 targeting guide sequence portion
aggagaaguuaguguaauaag

SEQ ID NO: 13836 - RNA, 21 nt, Artificial Sequence
  SAMD9 targeting guide sequence portion
aggagcaacauuuauucuuac

SEQ ID NO: 13837 - RNA, 21 nt, Artificial Sequence
  SAMD9 targeting guide sequence portion
aggagcuaugacuggagucag

SEQ ID NO: 13838 - RNA, 21 nt, Artificial Sequence
  SAMD9 targeting guide sequence portion
aggagugagauauaugaaaag

SEQ ID NO: 13839 - RNA, 21 nt, Artificial Sequence
  SAMD9 targeting guide sequence portion
aggcauggauugaagaagauu

SEQ ID NO: 13840 - RNA, 21 nt, Artificial Sequence
  SAMD9 targeting guide sequence portion
aggcuguaucuauaaccuugc

SEQ ID NO: 13841 - RNA, 21 nt, Artificial Sequence
  SAMD9 targeting guide sequence portion
agguuauagauacagccucua

SEQ ID NO: 13842 - RNA, 21 nt, Artificial Sequence
  SAMD9 targeting guide sequence portion
agguuuuugcugucuuugaga

SEQ ID NO: 13843 - RNA, 21 nt, Artificial Sequence
  SAMD9 targeting guide sequence portion
aguaagaauaaauguugcucc

SEQ ID NO: 13844 - RNA, 21 nt, Artificial Sequence
  SAMD9 targeting guide sequence portion
aguagacaaucuucuucaauc

SEQ ID NO: 13845 - RNA, 21 nt, Artificial Sequence
  SAMD9 targeting guide sequence portion
aguagcaaauauguuccuugg

SEQ ID NO: 13846 - RNA, 21 nt, Artificial Sequence
  SAMD9 targeting guide sequence portion
aguagugggguucuguguagc

SEQ ID NO: 13847 - RNA, 21 nt, Artificial Sequence
  SAMD9 targeting guide sequence portion
aguauuuaauuuccucuuaaa

SEQ ID NO: 13848 - RNA, 21 nt, Artificial Sequence
  SAMD9 targeting guide sequence portion
agucaggagaaguuaguguaa

SEQ ID NO: 13849 - RNA, 21 nt, Artificial Sequence
  SAMD9 targeting guide sequence portion
agucauagcuccuuauuauuu

SEQ ID NO: 13850 - RNA, 21 nt, Artificial Sequence
  SAMD9 targeting guide sequence portion
agugaaaaaggaaggagugag

SEQ ID NO: 13851 - RNA, 21 nt, Artificial Sequence
  SAMD9 targeting guide sequence portion
agugagauauaugaaaaguag

SEQ ID NO: 13852 - RNA, 21 nt, Artificial Sequence
  SAMD9 targeting guide sequence portion
agugccaagcacaugauacau

SEQ ID NO: 13853 - RNA, 21 nt, Artificial Sequence
  SAMD9 targeting guide sequence portion
agugggguucuguguagccag

SEQ ID NO: 13854 - RNA, 21 nt, Artificial Sequence
  SAMD9 targeting guide sequence portion
aguguaauaagcuggcuacac

SEQ ID NO: 13855 - RNA, 21 nt, Artificial Sequence
  SAMD9 targeting guide sequence portion
aguuaguguaauaagcuggcu

SEQ ID NO: 13856 - RNA, 21 nt, Artificial Sequence
  SAMD9 targeting guide sequence portion
aguucuacaaagacaauagug

SEQ ID NO: 13857 - RNA, 21 nt, Artificial Sequence
  SAMD9 targeting guide sequence portion
aguuugagagguuuuugcugu

SEQ ID NO: 13858 - RNA, 21 nt, Artificial Sequence
  SAMD9 targeting guide sequence portion
auaaauguugcuccucaguuu

SEQ ID NO: 13859 - RNA, 21 nt, Artificial Sequence
  SAMD9 targeting guide sequence portion
auaaccuugccgguuuaaagc

SEQ ID NO: 13860 - RNA, 21 nt, Artificial Sequence
  SAMD9 targeting guide sequence portion
auaagcuggcuacacagaacc

SEQ ID NO: 13861 - RNA, 21 nt, Artificial Sequence
  SAMD9 targeting guide sequence portion
auaaggagcuaugacuggagu

SEQ ID NO: 13862 - RNA, 21 nt, Artificial Sequence
  SAMD9 targeting guide sequence portion
auaauaaggagcuaugacugg

SEQ ID NO: 13863 - RNA, 21 nt, Artificial Sequence
  SAMD9 targeting guide sequence portion
auacagccucuagcucuucag

SEQ ID NO: 13864 - RNA, 21 nt, Artificial Sequence
  SAMD9 targeting guide sequence portion
auacauugaugaucugcuuag

SEQ ID NO: 13865 - RNA, 21 nt, Artificial Sequence
  SAMD9 targeting guide sequence portion
auacugcauguacagaucuga

SEQ ID NO: 13866 - RNA, 21 nt, Artificial Sequence
  SAMD9 targeting guide sequence portion
auagauacagccucuagcucu

SEQ ID NO: 13867 - RNA, 21 nt, Artificial Sequence
  SAMD9 targeting guide sequence portion
auagcuccuuauuauuuuguc

SEQ ID NO: 13868 - RNA, 21 nt, Artificial Sequence
  SAMD9 targeting guide sequence portion
auagugaaaaaggaaggagug

SEQ ID NO: 13869 - RNA, 21 nt, Artificial Sequence
  SAMD9 targeting guide sequence portion
auauaucucacuccuuccuuu

SEQ ID NO: 13870 - RNA, 21 nt, Artificial Sequence
  SAMD9 targeting guide sequence portion
auauaugaaaaguagcaaaua

SEQ ID NO: 13871 - RNA, 21 nt, Artificial Sequence
  SAMD9 targeting guide sequence portion
auaucucacuccuuccuuuuu

SEQ ID NO: 13872 - RNA, 21 nt, Artificial Sequence
  SAMD9 targeting guide sequence portion
auaugaaaaguagcaaauaug

SEQ ID NO: 13873 - RNA, 21 nt, Artificial Sequence
  SAMD9 targeting guide sequence portion
auauguuccuugguuugguua

SEQ ID NO: 13874 - RNA, 21 nt, Artificial Sequence
  SAMD9 targeting guide sequence portion
auauucuuccuccaagaauuu

SEQ ID NO: 13875 - RNA, 21 nt, Artificial Sequence
  SAMD9 targeting guide sequence portion
auauuucucaaagacagcaaa

SEQ ID NO: 13876 - RNA, 21 nt, Artificial Sequence
  SAMD9 targeting guide sequence portion
auauuugcuacuuuucauaua

SEQ ID NO: 13877 - RNA, 21 nt, Artificial Sequence
  SAMD9 targeting guide sequence portion
auauuuucccagacauucuaa

SEQ ID NO: 13878 - RNA, 21 nt, Artificial Sequence
  SAMD9 targeting guide sequence portion
aucaaauucuuggaggaagaa

SEQ ID NO: 13879 - RNA, 21 nt, Artificial Sequence
  SAMD9 targeting guide sequence portion
aucaaugauguuaaccaaacc

SEQ ID NO: 13880 - RNA, 21 nt, Artificial Sequence
  SAMD9 targeting guide sequence portion
aucaauguaucaugugcuugg

SEQ ID NO: 13881 - RNA, 21 nt, Artificial Sequence
  SAMD9 targeting guide sequence portion
aucaucaauguaucaugugcu

SEQ ID NO: 13882 - RNA, 21 nt, Artificial Sequence
  SAMD9 targeting guide sequence portion
aucaugugcuuggcacucaag

SEQ ID NO: 13883 - RNA, 21 nt, Artificial Sequence
  SAMD9 targeting guide sequence portion
aucauugaugacaaaauaaua

SEQ ID NO: 13884 - RNA, 21 nt, Artificial Sequence
  SAMD9 targeting guide sequence portion
auccaugccugguaaguagug

SEQ ID NO: 13885 - RNA, 21 nt, Artificial Sequence
  SAMD9 targeting guide sequence portion
auccuugagugccaagcacau

SEQ ID NO: 13886 - RNA, 21 nt, Artificial Sequence
  SAMD9 targeting guide sequence portion
aucuauaaccuugccgguuua

SEQ ID NO: 13887 - RNA, 21 nt, Artificial Sequence
  SAMD9 targeting guide sequence portion
aucuaugcuuuaaaccggcaa

SEQ ID NO: 13888 - RNA, 21 nt, Artificial Sequence
  SAMD9 targeting guide sequence portion
aucucacuccuuccuuuuuca

SEQ ID NO: 13889 - RNA, 21 nt, Artificial Sequence
  SAMD9 targeting guide sequence portion
aucugaagagcuagaggcugu

SEQ ID NO: 13890 - RNA, 21 nt, Artificial Sequence
  SAMD9 targeting guide sequence portion
aucugcuuaguaagaauaaau

SEQ ID NO: 13891 - RNA, 21 nt, Artificial Sequence
  SAMD9 targeting guide sequence portion
aucuguacaugcaguauuuaa

SEQ ID NO: 13892 - RNA, 21 nt, Artificial Sequence
  SAMD9 targeting guide sequence portion
aucuucuucaauccaugccug

SEQ ID NO: 13893 - RNA, 21 nt, Artificial Sequence
  SAMD9 targeting guide sequence portion
augaaaaguagcaaauauguu

SEQ ID NO: 13894 - RNA, 21 nt, Artificial Sequence
  SAMD9 targeting guide sequence portion
augacaaaauaauaaggagcu

SEQ ID NO: 13895 - RNA, 21 nt, Artificial Sequence
  SAMD9 targeting guide sequence portion
augacuggagucaggagaagu

SEQ ID NO: 13896 - RNA, 21 nt, Artificial Sequence
  SAMD9 targeting guide sequence portion
augaguucuacaaagacaaua

SEQ ID NO: 13897 - RNA, 21 nt, Artificial Sequence
  SAMD9 targeting guide sequence portion
augauacauugaugaucugcu

SEQ ID NO: 13898 - RNA, 21 nt, Artificial Sequence
  SAMD9 targeting guide sequence portion
augaucugcuuaguaagaaua

SEQ ID NO: 13899 - RNA, 21 nt, Artificial Sequence
  SAMD9 targeting guide sequence portion
augauguuaaccaaaccaagg

SEQ ID NO: 13900 - RNA, 21 nt, Artificial Sequence
  SAMD9 targeting guide sequence portion
augcaguauuuaauuuccucu

SEQ ID NO: 13901 - RNA, 21 nt, Artificial Sequence
  SAMD9 targeting guide sequence portion
augccauuugaguagacaauc

SEQ ID NO: 13902 - RNA, 21 nt, Artificial Sequence
  SAMD9 targeting guide sequence portion
augccugguaaguaguggggu

SEQ ID NO: 13903 - RNA, 21 nt, Artificial Sequence
  SAMD9 targeting guide sequence portion
augcuuuaaaccggcaagguu

SEQ ID NO: 13904 - RNA, 21 nt, Artificial Sequence
  SAMD9 targeting guide sequence portion
auggauugaagaagauugucu

SEQ ID NO: 13905 - RNA, 21 nt, Artificial Sequence
  SAMD9 targeting guide sequence portion
auggcauuuagacauuagaau

SEQ ID NO: 13906 - RNA, 21 nt, Artificial Sequence
  SAMD9 targeting guide sequence portion
auggguacugagaucaaauuc

SEQ ID NO: 13907 - RNA, 21 nt, Artificial Sequence
  SAMD9 targeting guide sequence portion
auguacagaucugaagagcua

SEQ ID NO: 13908 - RNA, 21 nt, Artificial Sequence
  SAMD9 targeting guide sequence portion
auguaucaugugcuuggcacu

SEQ ID NO: 13909 - RNA, 21 nt, Artificial Sequence
  SAMD9 targeting guide sequence portion
augucuaaaugccauuugagu

SEQ ID NO: 13910 - RNA, 21 nt, Artificial Sequence
  SAMD9 targeting guide sequence portion
augucugggaaaauauuucuc

SEQ ID NO: 13911 - RNA, 21 nt, Artificial Sequence
  SAMD9 targeting guide sequence portion
augugcuuggcacucaaggau

SEQ ID NO: 13912 - RNA, 21 nt, Artificial Sequence
  SAMD9 targeting guide sequence portion
auguuaaccaaaccaaggaac

SEQ ID NO: 13913 - RNA, 21 nt, Artificial Sequence
  SAMD9 targeting guide sequence portion
auguuaugaguucuacaaaga

SEQ ID NO: 13914 - RNA, 21 nt, Artificial Sequence
  SAMD9 targeting guide sequence portion
auguuccuugguuugguuaac

SEQ ID NO: 13915 - RNA, 21 nt, Artificial Sequence
  SAMD9 targeting guide sequence portion
auguugcuccucaguuugaga

SEQ ID NO: 13916 - RNA, 21 nt, Artificial Sequence
  SAMD9 targeting guide sequence portion
auguuuaagaggaaauuaaau

SEQ ID NO: 13917 - RNA, 21 nt, Artificial Sequence
  SAMD9 targeting guide sequence portion
auuaaauacugcauguacaga

SEQ ID NO: 13918 - RNA, 21 nt, Artificial Sequence
  SAMD9 targeting guide sequence portion
auuaaauggguacugagauca

SEQ ID NO: 13919 - RNA, 21 nt, Artificial Sequence
  SAMD9 targeting guide sequence portion
auuacacuaacuucuccugac

SEQ ID NO: 13920 - RNA, 21 nt, Artificial Sequence
  SAMD9 targeting guide sequence portion
auuagaaugucugggaaaaua

SEQ ID NO: 13921 - RNA, 21 nt, Artificial Sequence
  SAMD9 targeting guide sequence portion
auuauuuugucaucaaugaug

SEQ ID NO: 13922 - RNA, 21 nt, Artificial Sequence
  SAMD9 targeting guide sequence portion
auucuaaugucuaaaugccau

SEQ ID NO: 13923 - RNA, 21 nt, Artificial Sequence
  SAMD9 targeting guide sequence portion
auucuuacuaagcagaucauc

SEQ ID NO: 13924 - RNA, 21 nt, Artificial Sequence
  SAMD9 targeting guide sequence portion
auucuuccuccaagaauuuga

SEQ ID NO: 13925 - RNA, 21 nt, Artificial Sequence
  SAMD9 targeting guide sequence portion
auugaagaagauugucuacuc

SEQ ID NO: 13926 - RNA, 21 nt, Artificial Sequence
  SAMD9 targeting guide sequence portion
auugaugacaaaauaauaagg

SEQ ID NO: 13927 - RNA, 21 nt, Artificial Sequence
  SAMD9 targeting guide sequence portion
auugaugaucugcuuaguaag

SEQ ID NO: 13928 - RNA, 21 nt, Artificial Sequence
  SAMD9 targeting guide sequence portion
auugucuacucaaauggcauu

SEQ ID NO: 13929 - RNA, 21 nt, Artificial Sequence
  SAMD9 targeting guide sequence portion
auugucuuuguagaacucaua

SEQ ID NO: 13930 - RNA, 21 nt, Artificial Sequence
  SAMD9 targeting guide sequence portion
auuuaauuuccucuuaaacau

SEQ ID NO: 13931 - RNA, 21 nt, Artificial Sequence
  SAMD9 targeting guide sequence portion
auuuagacauuagaaugucug

SEQ ID NO: 13932 - RNA, 21 nt, Artificial Sequence
  SAMD9 targeting guide sequence portion
auuuauucuuacuaagcagau

SEQ ID NO: 13933 - RNA, 21 nt, Artificial Sequence
  SAMD9 targeting guide sequence portion
auuuccucuuaaacauguuau

SEQ ID NO: 13934 - RNA, 21 nt, Artificial Sequence
  SAMD9 targeting guide sequence portion
auuucucaaagacagcaaaaa

SEQ ID NO: 13935 - RNA, 21 nt, Artificial Sequence
  SAMD9 targeting guide sequence portion
auuugaguagacaaucuucuu

SEQ ID NO: 13936 - RNA, 21 nt, Artificial Sequence
  SAMD9 targeting guide sequence portion
auuugaucucaguacccauuu

SEQ ID NO: 13937 - RNA, 21 nt, Artificial Sequence
  SAMD9 targeting guide sequence portion
auuugcuacuuuucauauauc

SEQ ID NO: 13938 - RNA, 21 nt, Artificial Sequence
  SAMD9 targeting guide sequence portion
auuuucccagacauucuaaug

SEQ ID NO: 13939 - RNA, 21 nt, Artificial Sequence
  SAMD9 targeting guide sequence portion
auuuugucaucaaugauguua

SEQ ID NO: 13940 - RNA, 21 nt, Artificial Sequence
  SAMD9 targeting guide sequence portion
caaaaaccucucaaacugagg

SEQ ID NO: 13941 - RNA, 21 nt, Artificial Sequence
  SAMD9 targeting guide sequence portion
caaaauaauaaggagcuauga

SEQ ID NO: 13942 - RNA, 21 nt, Artificial Sequence
  SAMD9 targeting guide sequence portion
caaaccaaggaacauauuugc

SEQ ID NO: 13943 - RNA, 21 nt, Artificial Sequence
  SAMD9 targeting guide sequence portion
caaacugaggagcaacauuua

SEQ ID NO: 13944 - RNA, 21 nt, Artificial Sequence
  SAMD9 targeting guide sequence portion
caaagacaauagugaaaaagg

SEQ ID NO: 13945 - RNA, 21 nt, Artificial Sequence
  SAMD9 targeting guide sequence portion
caaagacagcaaaaaccucuc

SEQ ID NO: 13946 - RNA, 21 nt, Artificial Sequence
  SAMD9 targeting guide sequence portion
caaauauguuccuugguuugg

SEQ ID NO: 13947 - RNA, 21 nt, Artificial Sequence
  SAMD9 targeting guide sequence portion
caaauggcauuuagacauuag

SEQ ID NO: 13948 - RNA, 21 nt, Artificial Sequence
  SAMD9 targeting guide sequence portion
caaauucuuggaggaagaaua

SEQ ID NO: 13949 - RNA, 21 nt, Artificial Sequence
  SAMD9 targeting guide sequence portion
caacauuuauucuuacuaagc

SEQ ID NO: 13950 - RNA, 21 nt, Artificial Sequence
  SAMD9 targeting guide sequence portion
caagaauuugaucucaguacc

SEQ ID NO: 13951 - RNA, 21 nt, Artificial Sequence
  SAMD9 targeting guide sequence portion
caagaucuaugcuuuaaaccg

SEQ ID NO: 13952 - RNA, 21 nt, Artificial Sequence
  SAMD9 targeting guide sequence portion
caagcacaugauacauugaug

SEQ ID NO: 13953 - RNA, 21 nt, Artificial Sequence
  SAMD9 targeting guide sequence portion
caaggaacauauuugcuacuu

SEQ ID NO: 13954 - RNA, 21 nt, Artificial Sequence
  SAMD9 targeting guide sequence portion
caagguuauagauacagccuc

SEQ ID NO: 13955 - RNA, 21 nt, Artificial Sequence
  SAMD9 targeting guide sequence portion
caauagugaaaaaggaaggag

SEQ ID NO: 13956 - RNA, 21 nt, Artificial Sequence
  SAMD9 targeting guide sequence portion
caauccaugccugguaaguag

SEQ ID NO: 13957 - RNA, 21 nt, Artificial Sequence
  SAMD9 targeting guide sequence portion
caaucuucuucaauccaugcc

SEQ ID NO: 13958 - RNA, 21 nt, Artificial Sequence
  SAMD9 targeting guide sequence portion
caaugauguuaaccaaaccaa

SEQ ID NO: 13959 - RNA, 21 nt, Artificial Sequence
  SAMD9 targeting guide sequence portion
caauguaucaugugcuuggca

SEQ ID NO: 13960 - RNA, 21 nt, Artificial Sequence
  SAMD9 targeting guide sequence portion
cacagaaccccacuacuuacc

SEQ ID NO: 13961 - RNA, 21 nt, Artificial Sequence
  SAMD9 targeting guide sequence portion
cacaugauacauugaugaucu

SEQ ID NO: 13962 - RNA, 21 nt, Artificial Sequence
  SAMD9 targeting guide sequence portion
cacuaacuucuccugacucca

SEQ ID NO: 13963 - RNA, 21 nt, Artificial Sequence
  SAMD9 targeting guide sequence portion
cacuacuuaccaggcauggau

SEQ ID NO: 13964 - RNA, 21 nt, Artificial Sequence
  SAMD9 targeting guide sequence portion
cacuauugucuuuguagaacu

SEQ ID NO: 13965 - RNA, 21 nt, Artificial Sequence
  SAMD9 targeting guide sequence portion
cacucaaggaucuuccaaaac

SEQ ID NO: 13966 - RNA, 21 nt, Artificial Sequence
  SAMD9 targeting guide sequence portion
cacuccuuccuuuuucacuau

SEQ ID NO: 13967 - RNA, 21 nt, Artificial Sequence
  SAMD9 targeting guide sequence portion
cagaaccccacuacuuaccag

SEQ ID NO: 13968 - RNA, 21 nt, Artificial Sequence
  SAMD9 targeting guide sequence portion
cagacauucuaaugucuaaau

SEQ ID NO: 13969 - RNA, 21 nt, Artificial Sequence
  SAMD9 targeting guide sequence portion
cagaucaucaauguaucaugu

SEQ ID NO: 13970 - RNA, 21 nt, Artificial Sequence
  SAMD9 targeting guide sequence portion
cagaucugaagagcuagaggc

SEQ ID NO: 13971 - RNA, 21 nt, Artificial Sequence
  SAMD9 targeting guide sequence portion
cagaucuguacaugcaguauu

SEQ ID NO: 13972 - RNA, 21 nt, Artificial Sequence
  SAMD9 targeting guide sequence portion
cagcaaaaaccucucaaacug

SEQ ID NO: 13973 - RNA, 21 nt, Artificial Sequence
  SAMD9 targeting guide sequence portion
cagccucuagcucuucagauc

SEQ ID NO: 13974 - RNA, 21 nt, Artificial Sequence
  SAMD9 targeting guide sequence portion
cagcuuauuacacuaacuucu

SEQ ID NO: 13975 - RNA, 21 nt, Artificial Sequence
  SAMD9 targeting guide sequence portion
caggagaaguuaguguaauaa

SEQ ID NO: 13976 - RNA, 21 nt, Artificial Sequence
  SAMD9 targeting guide sequence portion
caggcauggauugaagaagau

SEQ ID NO: 13977 - RNA, 21 nt, Artificial Sequence
  SAMD9 targeting guide sequence portion
caguauuuaauuuccucuuaa

SEQ ID NO: 13978 - RNA, 21 nt, Artificial Sequence
  SAMD9 targeting guide sequence portion
cagucauagcuccuuauuauu

SEQ ID NO: 13979 - RNA, 21 nt, Artificial Sequence
  SAMD9 targeting guide sequence portion
caguuugagagguuuuugcug

SEQ ID NO: 13980 - RNA, 21 nt, Artificial Sequence
  SAMD9 targeting guide sequence portion
cauaacauguuuaagaggaaa

SEQ ID NO: 13981 - RNA, 21 nt, Artificial Sequence
  SAMD9 targeting guide sequence portion
cauagcuccuuauuauuuugu

SEQ ID NO: 13982 - RNA, 21 nt, Artificial Sequence
  SAMD9 targeting guide sequence portion
cauauaucucacuccuuccuu

SEQ ID NO: 13983 - RNA, 21 nt, Artificial Sequence
  SAMD9 targeting guide sequence portion
cauauuugcuacuuuucauau

SEQ ID NO: 13984 - RNA, 21 nt, Artificial Sequence
  SAMD9 targeting guide sequence portion
caucaaugauguuaaccaaac

SEQ ID NO: 13985 - RNA, 21 nt, Artificial Sequence
  SAMD9 targeting guide sequence portion
caucaauguaucaugugcuug

SEQ ID NO: 13986 - RNA, 21 nt, Artificial Sequence
  SAMD9 targeting guide sequence portion
caucauugaugacaaaauaau

SEQ ID NO: 13987 - RNA, 21 nt, Artificial Sequence
  SAMD9 targeting guide sequence portion
caugauacauugaugaucugc

SEQ ID NO: 13988 - RNA, 21 nt, Artificial Sequence
  SAMD9 targeting guide sequence portion
caugcaguauuuaauuuccuc

SEQ ID NO: 13989 - RNA, 21 nt, Artificial Sequence
  SAMD9 targeting guide sequence portion
caugccugguaaguagugggg

SEQ ID NO: 13990 - RNA, 21 nt, Artificial Sequence
  SAMD9 targeting guide sequence portion
cauggauugaagaagauuguc

SEQ ID NO: 13991 - RNA, 21 nt, Artificial Sequence
  SAMD9 targeting guide sequence portion
cauguacagaucugaagagcu

SEQ ID NO: 13992 - RNA, 21 nt, Artificial Sequence
  SAMD9 targeting guide sequence portion
caugugcuuggcacucaagga

SEQ ID NO: 13993 - RNA, 21 nt, Artificial Sequence
  SAMD9 targeting guide sequence portion
cauguuaugaguucuacaaag

SEQ ID NO: 13994 - RNA, 21 nt, Artificial Sequence
  SAMD9 targeting guide sequence portion
cauguuuaagaggaaauuaaa

SEQ ID NO: 13995 - RNA, 21 nt, Artificial Sequence
  SAMD9 targeting guide sequence portion
cauuagaaugucugggaaaau

SEQ ID NO: 13996 - RNA, 21 nt, Artificial Sequence
  SAMD9 targeting guide sequence portion
cauucuaaugucuaaaugcca

SEQ ID NO: 13997 - RNA, 21 nt, Artificial Sequence
  SAMD9 targeting guide sequence portion
cauugaugacaaaauaauaag

SEQ ID NO: 13998 - RNA, 21 nt, Artificial Sequence
  SAMD9 targeting guide sequence portion
cauugaugaucugcuuaguaa

SEQ ID NO: 13999 - RNA, 21 nt, Artificial Sequence
  SAMD9 targeting guide sequence portion
cauuuagacauuagaaugucu

SEQ ID NO: 14000 - RNA, 21 nt, Artificial Sequence
  SAMD9 targeting guide sequence portion
cauuuauucuuacuaagcaga

SEQ ID NO: 14001 - RNA, 21 nt, Artificial Sequence
  SAMD9 targeting guide sequence portion
cauuugaguagacaaucuucu

SEQ ID NO: 14002 - RNA, 21 nt, Artificial Sequence
  SAMD9 targeting guide sequence portion
ccaaaccaaggaacauauuug

SEQ ID NO: 14003 - RNA, 21 nt, Artificial Sequence
  SAMD9 targeting guide sequence portion
ccaagaauuugaucucaguac

SEQ ID NO: 14004 - RNA, 21 nt, Artificial Sequence
  SAMD9 targeting guide sequence portion
ccaagcacaugauacauugau

SEQ ID NO: 14005 - RNA, 21 nt, Artificial Sequence
  SAMD9 targeting guide sequence portion
ccaaggaacauauuugcuacu

SEQ ID NO: 14006 - RNA, 21 nt, Artificial Sequence
  SAMD9 targeting guide sequence portion
ccacuacuuaccaggcaugga

SEQ ID NO: 14007 - RNA, 21 nt, Artificial Sequence
  SAMD9 targeting guide sequence portion
ccagacauucuaaugucuaaa

SEQ ID NO: 14008 - RNA, 21 nt, Artificial Sequence
  SAMD9 targeting guide sequence portion
ccagcuuauuacacuaacuuc

SEQ ID NO: 14009 - RNA, 21 nt, Artificial Sequence
  SAMD9 targeting guide sequence portion
ccaggcauggauugaagaaga

SEQ ID NO: 14010 - RNA, 21 nt, Artificial Sequence
  SAMD9 targeting guide sequence portion
ccagucauagcuccuuauuau

SEQ ID NO: 14011 - RNA, 21 nt, Artificial Sequence
  SAMD9 targeting guide sequence portion
ccaugccugguaaguaguggg

SEQ ID NO: 14012 - RNA, 21 nt, Artificial Sequence
  SAMD9 targeting guide sequence portion
ccauuugaguagacaaucuuc

SEQ ID NO: 14013 - RNA, 21 nt, Artificial Sequence
  SAMD9 targeting guide sequence portion
cccacuacuuaccaggcaugg

SEQ ID NO: 14014 - RNA, 21 nt, Artificial Sequence
  SAMD9 targeting guide sequence portion
cccagacauucuaaugucuaa

SEQ ID NO: 14015 - RNA, 21 nt, Artificial Sequence
  SAMD9 targeting guide sequence portion
ccccacuacuuaccaggcaug

SEQ ID NO: 14016 - RNA, 21 nt, Artificial Sequence
  SAMD9 targeting guide sequence portion
ccggcaagguuauagauacag

SEQ ID NO: 14017 - RNA, 21 nt, Artificial Sequence
  SAMD9 targeting guide sequence portion
ccgguuuaaagcauagaucuu

SEQ ID NO: 14018 - RNA, 21 nt, Artificial Sequence
  SAMD9 targeting guide sequence portion
ccucaguuugagagguuuuug

SEQ ID NO: 14019 - RNA, 21 nt, Artificial Sequence
  SAMD9 targeting guide sequence portion
ccuccaagaauuugaucucag

SEQ ID NO: 14020 - RNA, 21 nt, Artificial Sequence
  SAMD9 targeting guide sequence portion
ccucuagcucuucagaucugu

SEQ ID NO: 14021 - RNA, 21 nt, Artificial Sequence
  SAMD9 targeting guide sequence portion
ccucucaaacugaggagcaac

SEQ ID NO: 14022 - RNA, 21 nt, Artificial Sequence
  SAMD9 targeting guide sequence portion
ccucuguuuuggaagauccuu

SEQ ID NO: 14023 - RNA, 21 nt, Artificial Sequence
  SAMD9 targeting guide sequence portion
ccucuuaaacauguuaugagu

SEQ ID NO: 14024 - RNA, 21 nt, Artificial Sequence
  SAMD9 targeting guide sequence portion
ccugacuccagucauagcucc

SEQ ID NO: 14025 - RNA, 21 nt, Artificial Sequence
  SAMD9 targeting guide sequence portion
ccugauauucuuccuccaaga

SEQ ID NO: 14026 - RNA, 21 nt, Artificial Sequence
  SAMD9 targeting guide sequence portion
ccugguaaguagugggguucu

SEQ ID NO: 14027 - RNA, 21 nt, Artificial Sequence
  SAMD9 targeting guide sequence portion
ccuuauuauuuugucaucaau

SEQ ID NO: 14028 - RNA, 21 nt, Artificial Sequence
  SAMD9 targeting guide sequence portion
ccuuccuuuuucacuauuguc

SEQ ID NO: 14029 - RNA, 21 nt, Artificial Sequence
  SAMD9 targeting guide sequence portion
ccuugagugccaagcacauga

SEQ ID NO: 14030 - RNA, 21 nt, Artificial Sequence
  SAMD9 targeting guide sequence portion
ccuugccgguuuaaagcauag

SEQ ID NO: 14031 - RNA, 21 nt, Artificial Sequence
  SAMD9 targeting guide sequence portion
ccuugguuugguuaacaucau

SEQ ID NO: 14032 - RNA, 21 nt, Artificial Sequence
  SAMD9 targeting guide sequence portion
ccuuuuucacuauugucuuug

SEQ ID NO: 14033 - RNA, 21 nt, Artificial Sequence
  SAMD9 targeting guide sequence portion
cggcaagguuauagauacagc

SEQ ID NO: 14034 - RNA, 21 nt, Artificial Sequence
  SAMD9 targeting guide sequence portion
cgguuuaaagcauagaucuug

SEQ ID NO: 14035 - RNA, 21 nt, Artificial Sequence
  SAMD9 targeting guide sequence portion
cuaaaugccauuugaguagac

SEQ ID NO: 14036 - RNA, 21 nt, Artificial Sequence
  SAMD9 targeting guide sequence portion
cuaacuucuccugacuccagu

SEQ ID NO: 14037 - RNA, 21 nt, Artificial Sequence
  SAMD9 targeting guide sequence portion
cuaagcagaucaucaauguau

SEQ ID NO: 14038 - RNA, 21 nt, Artificial Sequence
  SAMD9 targeting guide sequence portion
cuaaugucuaaaugccauuug

SEQ ID NO: 14039 - RNA, 21 nt, Artificial Sequence
  SAMD9 targeting guide sequence portion
cuacaaagacaauagugaaaa

SEQ ID NO: 14040 - RNA, 21 nt, Artificial Sequence
  SAMD9 targeting guide sequence portion
cuacacagaaccccacuacuu

SEQ ID NO: 14041 - RNA, 21 nt, Artificial Sequence
  SAMD9 targeting guide sequence portion
cuacucaaauggcauuuagac

SEQ ID NO: 14042 - RNA, 21 nt, Artificial Sequence
  SAMD9 targeting guide sequence portion
cuacuuaccaggcauggauug

SEQ ID NO: 14043 - RNA, 21 nt, Artificial Sequence
  SAMD9 targeting guide sequence portion
cuacuuuucauauaucucacu

SEQ ID NO: 14044 - RNA, 21 nt, Artificial Sequence
  SAMD9 targeting guide sequence portion
cuagaggcuguaucuauaacc

SEQ ID NO: 14045 - RNA, 21 nt, Artificial Sequence
  SAMD9 targeting guide sequence portion
cuagcucuucagaucuguaca

SEQ ID NO: 14046 - RNA, 21 nt, Artificial Sequence
  SAMD9 targeting guide sequence portion
cuauaaccuugccgguuuaaa

SEQ ID NO: 14047 - RNA, 21 nt, Artificial Sequence
  SAMD9 targeting guide sequence portion
cuaugacuggagucaggagaa

SEQ ID NO: 14048 - RNA, 21 nt, Artificial Sequence
  SAMD9 targeting guide sequence portion
cuaugcuuuaaaccggcaagg

SEQ ID NO: 14049 - RNA, 21 nt, Artificial Sequence
  SAMD9 targeting guide sequence portion
cuauugucuuuguagaacuca

SEQ ID NO: 14050 - RNA, 21 nt, Artificial Sequence
  SAMD9 targeting guide sequence portion
cucaaacugaggagcaacauu

SEQ ID NO: 14051 - RNA, 21 nt, Artificial Sequence
  SAMD9 targeting guide sequence portion
cucaaagacagcaaaaaccuc

SEQ ID NO: 14052 - RNA, 21 nt, Artificial Sequence
  SAMD9 targeting guide sequence portion
cucaaauggcauuuagacauu

SEQ ID NO: 14053 - RNA, 21 nt, Artificial Sequence
  SAMD9 targeting guide sequence portion
cucaagaucuaugcuuuaaac

SEQ ID NO: 14054 - RNA, 21 nt, Artificial Sequence
  SAMD9 targeting guide sequence portion
cucacuccuuccuuuuucacu

SEQ ID NO: 14055 - RNA, 21 nt, Artificial Sequence
  SAMD9 targeting guide sequence portion
cucaguuugagagguuuuugc

SEQ ID NO: 14056 - RNA, 21 nt, Artificial Sequence
  SAMD9 targeting guide sequence portion
cucauaacauguuuaagagga

SEQ ID NO: 14057 - RNA, 21 nt, Artificial Sequence
  SAMD9 targeting guide sequence portion
cuccaagaauuugaucucagu

SEQ ID NO: 14058 - RNA, 21 nt, Artificial Sequence
  SAMD9 targeting guide sequence portion
cuccagucauagcuccuuauu

SEQ ID NO: 14059 - RNA, 21 nt, Artificial Sequence
  SAMD9 targeting guide sequence portion
cuccucaguuugagagguuuu

SEQ ID NO: 14060 - RNA, 21 nt, Artificial Sequence
  SAMD9 targeting guide sequence portion
cuccugacuccagucauagcu

SEQ ID NO: 14061 - RNA, 21 nt, Artificial Sequence
  SAMD9 targeting guide sequence portion
cuccuuauuauuuugucauca

SEQ ID NO: 14062 - RNA, 21 nt, Artificial Sequence
  SAMD9 targeting guide sequence portion
cuccuuccuuuuucacuauug

SEQ ID NO: 14063 - RNA, 21 nt, Artificial Sequence
  SAMD9 targeting guide sequence portion
cucuagcucuucagaucugua

SEQ ID NO: 14064 - RNA, 21 nt, Artificial Sequence
  SAMD9 targeting guide sequence portion
cucucaaacugaggagcaaca

SEQ ID NO: 14065 - RNA, 21 nt, Artificial Sequence
  SAMD9 targeting guide sequence portion
cucuguuuuggaagauccuug

SEQ ID NO: 14066 - RNA, 21 nt, Artificial Sequence
  SAMD9 targeting guide sequence portion
cucuuaaacauguuaugaguu

SEQ ID NO: 14067 - RNA, 21 nt, Artificial Sequence
  SAMD9 targeting guide sequence portion
cucuucagaucuguacaugca

SEQ ID NO: 14068 - RNA, 21 nt, Artificial Sequence
  SAMD9 targeting guide sequence portion
cugaagagcuagaggcuguau

SEQ ID NO: 14069 - RNA, 21 nt, Artificial Sequence
  SAMD9 targeting guide sequence portion
cugacuccagucauagcuccu

SEQ ID NO: 14070 - RNA, 21 nt, Artificial Sequence
  SAMD9 targeting guide sequence portion
cugagaucaaauucuuggagg

SEQ ID NO: 14071 - RNA, 21 nt, Artificial Sequence
  SAMD9 targeting guide sequence portion
cugaggagcaacauuuauucu

SEQ ID NO: 14072 - RNA, 21 nt, Artificial Sequence
  SAMD9 targeting guide sequence portion
cugauauucuuccuccaagaa

SEQ ID NO: 14073 - RNA, 21 nt, Artificial Sequence
  SAMD9 targeting guide sequence portion
cugcauguacagaucugaaga

SEQ ID NO: 14074 - RNA, 21 nt, Artificial Sequence
  SAMD9 targeting guide sequence portion
cugcuuaguaagaauaaaugu

SEQ ID NO: 14075 - RNA, 21 nt, Artificial Sequence
  SAMD9 targeting guide sequence portion
cuggagucaggagaaguuagu

SEQ ID NO: 14076 - RNA, 21 nt, Artificial Sequence
  SAMD9 targeting guide sequence portion
cuggcuacacagaaccccacu

SEQ ID NO: 14077 - RNA, 21 nt, Artificial Sequence
  SAMD9 targeting guide sequence portion
cugggaaaauauuucucaaag

SEQ ID NO: 14078 - RNA, 21 nt, Artificial Sequence
  SAMD9 targeting guide sequence portion
cugguaaguagugggguucug

SEQ ID NO: 14079 - RNA, 21 nt, Artificial Sequence
  SAMD9 targeting guide sequence portion
cuguacaugcaguauuuaauu

SEQ ID NO: 14080 - RNA, 21 nt, Artificial Sequence
  SAMD9 targeting guide sequence portion
cuguaucuauaaccuugccgg

SEQ ID NO: 14081 - RNA, 21 nt, Artificial Sequence
  SAMD9 targeting guide sequence portion
cugucuuugagaaauauuuuc

SEQ ID NO: 14082 - RNA, 21 nt, Artificial Sequence
  SAMD9 targeting guide sequence portion
cuguguagccagcuuauuaca

SEQ ID NO: 14083 - RNA, 21 nt, Artificial Sequence
  SAMD9 targeting guide sequence portion
cuguuuuggaagauccuugag

SEQ ID NO: 14084 - RNA, 21 nt, Artificial Sequence
  SAMD9 targeting guide sequence portion
cuuaaacauguuaugaguucu

SEQ ID NO: 14085 - RNA, 21 nt, Artificial Sequence
  SAMD9 targeting guide sequence portion
cuuaccaggcauggauugaag

SEQ ID NO: 14086 - RNA, 21 nt, Artificial Sequence
  SAMD9 targeting guide sequence portion
cuuacuaagcagaucaucaau

SEQ ID NO: 14087 - RNA, 21 nt, Artificial Sequence
  SAMD9 targeting guide sequence portion
cuuaguaagaauaaauguugc

SEQ ID NO: 14088 - RNA, 21 nt, Artificial Sequence
  SAMD9 targeting guide sequence portion
cuuauuacacuaacuucuccu

SEQ ID NO: 14089 - RNA, 21 nt, Artificial Sequence
  SAMD9 targeting guide sequence portion
cuuauuauuuugucaucaaug

SEQ ID NO: 14090 - RNA, 21 nt, Artificial Sequence
  SAMD9 targeting guide sequence portion
cuucaauccaugccugguaag

SEQ ID NO: 14091 - RNA, 21 nt, Artificial Sequence
  SAMD9 targeting guide sequence portion
cuucagaucuguacaugcagu

SEQ ID NO: 14092 - RNA, 21 nt, Artificial Sequence
  SAMD9 targeting guide sequence portion
cuuccuccaagaauuugaucu

SEQ ID NO: 14093 - RNA, 21 nt, Artificial Sequence
  SAMD9 targeting guide sequence portion
cuuccuuuuucacuauugucu

SEQ ID NO: 14094 - RNA, 21 nt, Artificial Sequence
  SAMD9 targeting guide sequence portion
cuucuccugacuccagucaua

SEQ ID NO: 14095 - RNA, 21 nt, Artificial Sequence
  SAMD9 targeting guide sequence portion
cuucuucaauccaugccuggu

SEQ ID NO: 14096 - RNA, 21 nt, Artificial Sequence
  SAMD9 targeting guide sequence portion
cuugagugccaagcacaugau

SEQ ID NO: 14097 - RNA, 21 nt, Artificial Sequence
  SAMD9 targeting guide sequence portion
cuugccgguuuaaagcauaga

SEQ ID NO: 14098 - RNA, 21 nt, Artificial Sequence
  SAMD9 targeting guide sequence portion
cuuggcacucaaggaucuucc

SEQ ID NO: 14099 - RNA, 21 nt, Artificial Sequence
  SAMD9 targeting guide sequence portion
cuugguuugguuaacaucauu

SEQ ID NO: 14100 - RNA, 21 nt, Artificial Sequence
  SAMD9 targeting guide sequence portion
cuuuaaaccggcaagguuaua

SEQ ID NO: 14101 - RNA, 21 nt, Artificial Sequence
  SAMD9 targeting guide sequence portion
cuuugagaaauauuuucccag

SEQ ID NO: 14102 - RNA, 21 nt, Artificial Sequence
  SAMD9 targeting guide sequence portion
cuuuguagaacucauaacaug

SEQ ID NO: 14103 - RNA, 21 nt, Artificial Sequence
  SAMD9 targeting guide sequence portion
cuuuucauauaucucacuccu

SEQ ID NO: 14104 - RNA, 21 nt, Artificial Sequence
  SAMD9 targeting guide sequence portion
cuuuuucacuauugucuuugu

SEQ ID NO: 14105 - RNA, 21 nt, Artificial Sequence
  SAMD9 targeting guide sequence portion
gaaaaaggaaggagugagaua

SEQ ID NO: 14106 - RNA, 21 nt, Artificial Sequence
  SAMD9 targeting guide sequence portion
gaaaaguagcaaauauguucc

SEQ ID NO: 14107 - RNA, 21 nt, Artificial Sequence
  SAMD9 targeting guide sequence portion
gaaaauauuucucaaagacag

SEQ ID NO: 14108 - RNA, 21 nt, Artificial Sequence
  SAMD9 targeting guide sequence portion
gaaauauuuucccagacauuc

SEQ ID NO: 14109 - RNA, 21 nt, Artificial Sequence
  SAMD9 targeting guide sequence portion
gaaauuaaauacugcauguac

SEQ ID NO: 14110 - RNA, 21 nt, Artificial Sequence
  SAMD9 targeting guide sequence portion
gaacauauuugcuacuuuuca

SEQ ID NO: 14111 - RNA, 21 nt, Artificial Sequence
  SAMD9 targeting guide sequence portion
gaaccccacuacuuaccaggc

SEQ ID NO: 14112 - RNA, 21 nt, Artificial Sequence
  SAMD9 targeting guide sequence portion
gaacucauaacauguuuaaga

SEQ ID NO: 14113 - RNA, 21 nt, Artificial Sequence
  SAMD9 targeting guide sequence portion
gaagaagauugucuacucaaa

SEQ ID NO: 14114 - RNA, 21 nt, Artificial Sequence
  SAMD9 targeting guide sequence portion
gaagagcuagaggcuguaucu

SEQ ID NO: 14115 - RNA, 21 nt, Artificial Sequence
  SAMD9 targeting guide sequence portion
gaagauccuugagugccaagc

SEQ ID NO: 14116 - RNA, 21 nt, Artificial Sequence
  SAMD9 targeting guide sequence portion
gaagauugucuacucaaaugg

SEQ ID NO: 14117 - RNA, 21 nt, Artificial Sequence
  SAMD9 targeting guide sequence portion
gaaggagugagauauaugaaa

SEQ ID NO: 14118 - RNA, 21 nt, Artificial Sequence
  SAMD9 targeting guide sequence portion
gaaguuaguguaauaagcugg

SEQ ID NO: 14119 - RNA, 21 nt, Artificial Sequence
  SAMD9 targeting guide sequence portion
gaauaaauguugcuccucagu

SEQ ID NO: 14120 - RNA, 21 nt, Artificial Sequence
  SAMD9 targeting guide sequence portion
gaaugucugggaaaauauuuc

SEQ ID NO: 14121 - RNA, 21 nt, Artificial Sequence
  SAMD9 targeting guide sequence portion
gaauuugaucucaguacccau

SEQ ID NO: 14122 - RNA, 21 nt, Artificial Sequence
  SAMD9 targeting guide sequence portion
gacaaaauaauaaggagcuau

SEQ ID NO: 14123 - RNA, 21 nt, Artificial Sequence
  SAMD9 targeting guide sequence portion
gacaauagugaaaaaggaagg

SEQ ID NO: 14124 - RNA, 21 nt, Artificial Sequence
  SAMD9 targeting guide sequence portion
gacaaucuucuucaauccaug

SEQ ID NO: 14125 - RNA, 21 nt, Artificial Sequence
  SAMD9 targeting guide sequence portion
gacagcaaaaaccucucaaac

SEQ ID NO: 14126 - RNA, 21 nt, Artificial Sequence
  SAMD9 targeting guide sequence portion
gacauuagaaugucugggaaa

SEQ ID NO: 14127 - RNA, 21 nt, Artificial Sequence
  SAMD9 targeting guide sequence portion
gacauucuaaugucuaaaugc

SEQ ID NO: 14128 - RNA, 21 nt, Artificial Sequence
  SAMD9 targeting guide sequence portion
gacucaagaucuaugcuuuaa

SEQ ID NO: 14129 - RNA, 21 nt, Artificial Sequence
  SAMD9 targeting guide sequence portion
gacuccagucauagcuccuua

SEQ ID NO: 14130 - RNA, 21 nt, Artificial Sequence
  SAMD9 targeting guide sequence portion
gacuggagucaggagaaguua

SEQ ID NO: 14131 - RNA, 21 nt, Artificial Sequence
  SAMD9 targeting guide sequence portion
gagaaauauuuucccagacau

SEQ ID NO: 14132 - RNA, 21 nt, Artificial Sequence
  SAMD9 targeting guide sequence portion
gagaaguuaguguaauaagcu

SEQ ID NO: 14133 - RNA, 21 nt, Artificial Sequence
  SAMD9 targeting guide sequence portion
gagagguuuuugcugucuuug

SEQ ID NO: 14134 - RNA, 21 nt, Artificial Sequence
  SAMD9 targeting guide sequence portion
gagauauaugaaaaguagcaa

SEQ ID NO: 14135 - RNA, 21 nt, Artificial Sequence
  SAMD9 targeting guide sequence portion
gagaucaaauucuuggaggaa

SEQ ID NO: 14136 - RNA, 21 nt, Artificial Sequence
  SAMD9 targeting guide sequence portion
gagcaacauuuauucuuacua

SEQ ID NO: 14137 - RNA, 21 nt, Artificial Sequence
  SAMD9 targeting guide sequence portion
gagccugauauucuuccucca

SEQ ID NO: 14138 - RNA, 21 nt, Artificial Sequence
  SAMD9 targeting guide sequence portion
gagcuagaggcuguaucuaua

SEQ ID NO: 14139 - RNA, 21 nt, Artificial Sequence
  SAMD9 targeting guide sequence portion
gagcuaugacuggagucagga

SEQ ID NO: 14140 - RNA, 21 nt, Artificial Sequence
  SAMD9 targeting guide sequence portion
gaggaaauuaaauacugcaug

SEQ ID NO: 14141 - RNA, 21 nt, Artificial Sequence
  SAMD9 targeting guide sequence portion
gaggagcaacauuuauucuua

SEQ ID NO: 14142 - RNA, 21 nt, Artificial Sequence
  SAMD9 targeting guide sequence portion
gaggcuguaucuauaaccuug

SEQ ID NO: 14143 - RNA, 21 nt, Artificial Sequence
  SAMD9 targeting guide sequence portion
gagguuuuugcugucuuugag

SEQ ID NO: 14144 - RNA, 21 nt, Artificial Sequence
  SAMD9 targeting guide sequence portion
gaguagacaaucuucuucaau

SEQ ID NO: 14145 - RNA, 21 nt, Artificial Sequence
  SAMD9 targeting guide sequence portion
gagucaggagaaguuagugua

SEQ ID NO: 14146 - RNA, 21 nt, Artificial Sequence
  SAMD9 targeting guide sequence portion
gagugagauauaugaaaagua

SEQ ID NO: 14147 - RNA, 21 nt, Artificial Sequence
  SAMD9 targeting guide sequence portion
gagugccaagcacaugauaca

SEQ ID NO: 14148 - RNA, 21 nt, Artificial Sequence
  SAMD9 targeting guide sequence portion
gaguucuacaaagacaauagu

SEQ ID NO: 14149 - RNA, 21 nt, Artificial Sequence
  SAMD9 targeting guide sequence portion
gauacagccucuagcucuuca

SEQ ID NO: 14150 - RNA, 21 nt, Artificial Sequence
  SAMD9 targeting guide sequence portion
gauacauugaugaucugcuua

SEQ ID NO: 14151 - RNA, 21 nt, Artificial Sequence
  SAMD9 targeting guide sequence portion
gauauaugaaaaguagcaaau

SEQ ID NO: 14152 - RNA, 21 nt, Artificial Sequence
  SAMD9 targeting guide sequence portion
gauauucuuccuccaagaauu

SEQ ID NO: 14153 - RNA, 21 nt, Artificial Sequence
  SAMD9 targeting guide sequence portion
gaucaaauucuuggaggaaga

SEQ ID NO: 14154 - RNA, 21 nt, Artificial Sequence
  SAMD9 targeting guide sequence portion
gaucaucaauguaucaugugc

SEQ ID NO: 14155 - RNA, 21 nt, Artificial Sequence
  SAMD9 targeting guide sequence portion
gauccuugagugccaagcaca

SEQ ID NO: 14156 - RNA, 21 nt, Artificial Sequence
  SAMD9 targeting guide sequence portion
gaucuaugcuuuaaaccggca

SEQ ID NO: 14157 - RNA, 21 nt, Artificial Sequence
  SAMD9 targeting guide sequence portion
gaucugaagagcuagaggcug

SEQ ID NO: 14158 - RNA, 21 nt, Artificial Sequence
  SAMD9 targeting guide sequence portion
gaucugcuuaguaagaauaaa

SEQ ID NO: 14159 - RNA, 21 nt, Artificial Sequence
  SAMD9 targeting guide sequence portion
gaucuguacaugcaguauuua

SEQ ID NO: 14160 - RNA, 21 nt, Artificial Sequence
  SAMD9 targeting guide sequence portion
gaugacaaaauaauaaggagc

SEQ ID NO: 14161 - RNA, 21 nt, Artificial Sequence
  SAMD9 targeting guide sequence portion
gaugaucugcuuaguaagaau

SEQ ID NO: 14162 - RNA, 21 nt, Artificial Sequence
  SAMD9 targeting guide sequence portion
gauguuaaccaaaccaaggaa

SEQ ID NO: 14163 - RNA, 21 nt, Artificial Sequence
  SAMD9 targeting guide sequence portion
gauugaagaagauugucuacu

SEQ ID NO: 14164 - RNA, 21 nt, Artificial Sequence
  SAMD9 targeting guide sequence portion
gauugucuacucaaauggcau

SEQ ID NO: 14165 - RNA, 21 nt, Artificial Sequence
  SAMD9 targeting guide sequence portion
gcaaaaaccucucaaacugag

SEQ ID NO: 14166 - RNA, 21 nt, Artificial Sequence
  SAMD9 targeting guide sequence portion
gcaaauauguuccuugguuug

SEQ ID NO: 14167 - RNA, 21 nt, Artificial Sequence
  SAMD9 targeting guide sequence portion
gcaacauuuauucuuacuaag

SEQ ID NO: 14168 - RNA, 21 nt, Artificial Sequence
  SAMD9 targeting guide sequence portion
gcaagguuauagauacagccu

SEQ ID NO: 14169 - RNA, 21 nt, Artificial Sequence
  SAMD9 targeting guide sequence portion
gcacaugauacauugaugauc

SEQ ID NO: 14170 - RNA, 21 nt, Artificial Sequence
  SAMD9 targeting guide sequence portion
gcacucaaggaucuuccaaaa

SEQ ID NO: 14171 - RNA, 21 nt, Artificial Sequence
  SAMD9 targeting guide sequence portion
gcagaucaucaauguaucaug

SEQ ID NO: 14172 - RNA, 21 nt, Artificial Sequence
  SAMD9 targeting guide sequence portion
gcaguauuuaauuuccucuua

SEQ ID NO: 14173 - RNA, 21 nt, Artificial Sequence
  SAMD9 targeting guide sequence portion
gcauggauugaagaagauugu

SEQ ID NO: 14174 - RNA, 21 nt, Artificial Sequence
  SAMD9 targeting guide sequence portion
gcauguacagaucugaagagc

SEQ ID NO: 14175 - RNA, 21 nt, Artificial Sequence
  SAMD9 targeting guide sequence portion
gcauuuagacauuagaauguc

SEQ ID NO: 14176 - RNA, 21 nt, Artificial Sequence
  SAMD9 targeting guide sequence portion
gccaagcacaugauacauuga

SEQ ID NO: 14177 - RNA, 21 nt, Artificial Sequence
  SAMD9 targeting guide sequence portion
gccagcuuauuacacuaacuu

SEQ ID NO: 14178 - RNA, 21 nt, Artificial Sequence
  SAMD9 targeting guide sequence portion
gccauuugaguagacaaucuu

SEQ ID NO: 14179 - RNA, 21 nt, Artificial Sequence
  SAMD9 targeting guide sequence portion
gccgguuuaaagcauagaucu

SEQ ID NO: 14180 - RNA, 21 nt, Artificial Sequence
  SAMD9 targeting guide sequence portion
gccucuagcucuucagaucug

SEQ ID NO: 14181 - RNA, 21 nt, Artificial Sequence
  SAMD9 targeting guide sequence portion
gccugauauucuuccuccaag

SEQ ID NO: 14182 - RNA, 21 nt, Artificial Sequence
  SAMD9 targeting guide sequence portion
gccugguaaguagugggguuc

SEQ ID NO: 14183 - RNA, 21 nt, Artificial Sequence
  SAMD9 targeting guide sequence portion
gcuacacagaaccccacuacu

SEQ ID NO: 14184 - RNA, 21 nt, Artificial Sequence
  SAMD9 targeting guide sequence portion
gcuacuuuucauauaucucac

SEQ ID NO: 14185 - RNA, 21 nt, Artificial Sequence
  SAMD9 targeting guide sequence portion
gcuagaggcuguaucuauaac

SEQ ID NO: 14186 - RNA, 21 nt, Artificial Sequence
  SAMD9 targeting guide sequence portion
gcuaugacuggagucaggaga

SEQ ID NO: 14187 - RNA, 21 nt, Artificial Sequence
  SAMD9 targeting guide sequence portion
gcuccucaguuugagagguuu

SEQ ID NO: 14188 - RNA, 21 nt, Artificial Sequence
  SAMD9 targeting guide sequence portion
gcuccuuauuauuuugucauc

SEQ ID NO: 14189 - RNA, 21 nt, Artificial Sequence
  SAMD9 targeting guide sequence portion
gcucuucagaucuguacaugc

SEQ ID NO: 14190 - RNA, 21 nt, Artificial Sequence
  SAMD9 targeting guide sequence portion
gcuggcuacacagaaccccac

SEQ ID NO: 14191 - RNA, 21 nt, Artificial Sequence
  SAMD9 targeting guide sequence portion
gcuguaucuauaaccuugccg

SEQ ID NO: 14192 - RNA, 21 nt, Artificial Sequence
  SAMD9 targeting guide sequence portion
gcugucuuugagaaauauuuu

SEQ ID NO: 14193 - RNA, 21 nt, Artificial Sequence
  SAMD9 targeting guide sequence portion
gcuuaguaagaauaaauguug

SEQ ID NO: 14194 - RNA, 21 nt, Artificial Sequence
  SAMD9 targeting guide sequence portion
gcuuauuacacuaacuucucc

SEQ ID NO: 14195 - RNA, 21 nt, Artificial Sequence
  SAMD9 targeting guide sequence portion
gcuuggcacucaaggaucuuc

SEQ ID NO: 14196 - RNA, 21 nt, Artificial Sequence
  SAMD9 targeting guide sequence portion
gcuuuaaaccggcaagguuau

SEQ ID NO: 14197 - RNA, 21 nt, Artificial Sequence
  SAMD9 targeting guide sequence portion
ggaaaauauuucucaaagaca

SEQ ID NO: 14198 - RNA, 21 nt, Artificial Sequence
  SAMD9 targeting guide sequence portion
ggaaauuaaauacugcaugua

SEQ ID NO: 14199 - RNA, 21 nt, Artificial Sequence
  SAMD9 targeting guide sequence portion
ggaacauauuugcuacuuuuc

SEQ ID NO: 14200 - RNA, 21 nt, Artificial Sequence
  SAMD9 targeting guide sequence portion
ggaagauccuugagugccaag

SEQ ID NO: 14201 - RNA, 21 nt, Artificial Sequence
  SAMD9 targeting guide sequence portion
ggaaggagugagauauaugaa

SEQ ID NO: 14202 - RNA, 21 nt, Artificial Sequence
  SAMD9 targeting guide sequence portion
ggacucaagaucuaugcuuua

SEQ ID NO: 14203 - RNA, 21 nt, Artificial Sequence
  SAMD9 targeting guide sequence portion
ggagaaguuaguguaauaagc

SEQ ID NO: 14204 - RNA, 21 nt, Artificial Sequence
  SAMD9 targeting guide sequence portion
ggagcaacauuuauucuuacu

SEQ ID NO: 14205 - RNA, 21 nt, Artificial Sequence
  SAMD9 targeting guide sequence portion
ggagcuaugacuggagucagg

SEQ ID NO: 14206 - RNA, 21 nt, Artificial Sequence
  SAMD9 targeting guide sequence portion
ggagucaggagaaguuagugu

SEQ ID NO: 14207 - RNA, 21 nt, Artificial Sequence
  SAMD9 targeting guide sequence portion
ggagugagauauaugaaaagu

SEQ ID NO: 14208 - RNA, 21 nt, Artificial Sequence
  SAMD9 targeting guide sequence portion
ggauugaagaagauugucuac

SEQ ID NO: 14209 - RNA, 21 nt, Artificial Sequence
  SAMD9 targeting guide sequence portion
ggcaagguuauagauacagcc

SEQ ID NO: 14210 - RNA, 21 nt, Artificial Sequence
  SAMD9 targeting guide sequence portion
ggcacucaaggaucuuccaaa

SEQ ID NO: 14211 - RNA, 21 nt, Artificial Sequence
  SAMD9 targeting guide sequence portion
ggcauggauugaagaagauug

SEQ ID NO: 14212 - RNA, 21 nt, Artificial Sequence
  SAMD9 targeting guide sequence portion
ggcauuuagacauuagaaugu

SEQ ID NO: 14213 - RNA, 21 nt, Artificial Sequence
  SAMD9 targeting guide sequence portion
ggcuacacagaaccccacuac

SEQ ID NO: 14214 - RNA, 21 nt, Artificial Sequence
  SAMD9 targeting guide sequence portion
ggcuguaucuauaaccuugcc

SEQ ID NO: 14215 - RNA, 21 nt, Artificial Sequence
  SAMD9 targeting guide sequence portion
gggaaaauauuucucaaagac

SEQ ID NO: 14216 - RNA, 21 nt, Artificial Sequence
  SAMD9 targeting guide sequence portion
gggguucuguguagccagcuu

SEQ ID NO: 14217 - RNA, 21 nt, Artificial Sequence
  SAMD9 targeting guide sequence portion
ggguacugagaucaaauucuu

SEQ ID NO: 14218 - RNA, 21 nt, Artificial Sequence
  SAMD9 targeting guide sequence portion
ggguucuguguagccagcuua

SEQ ID NO: 14219 - RNA, 21 nt, Artificial Sequence
  SAMD9 targeting guide sequence portion
gguaaguagugggguucugug

SEQ ID NO: 14220 - RNA, 21 nt, Artificial Sequence
  SAMD9 targeting guide sequence portion
gguacugagaucaaauucuug

SEQ ID NO: 14221 - RNA, 21 nt, Artificial Sequence
  SAMD9 targeting guide sequence portion
gguuaacaucauugaugacaa

SEQ ID NO: 14222 - RNA, 21 nt, Artificial Sequence
  SAMD9 targeting guide sequence portion
gguuauagauacagccucuag

SEQ ID NO: 14223 - RNA, 21 nt, Artificial Sequence
  SAMD9 targeting guide sequence portion
gguucuguguagccagcuuau

SEQ ID NO: 14224 - RNA, 21 nt, Artificial Sequence
  SAMD9 targeting guide sequence portion
gguuuaaagcauagaucuuga

SEQ ID NO: 14225 - RNA, 21 nt, Artificial Sequence
  SAMD9 targeting guide sequence portion
gguuugguuaacaucauugau

SEQ ID NO: 14226 - RNA, 21 nt, Artificial Sequence
  SAMD9 targeting guide sequence portion
gguuuuugcugucuuugagaa

SEQ ID NO: 14227 - RNA, 21 nt, Artificial Sequence
  SAMD9 targeting guide sequence portion
guaagaauaaauguugcuccu

SEQ ID NO: 14228 - RNA, 21 nt, Artificial Sequence
  SAMD9 targeting guide sequence portion
guaaguagugggguucugugu

SEQ ID NO: 14229 - RNA, 21 nt, Artificial Sequence
  SAMD9 targeting guide sequence portion
guaauaagcuggcuacacaga

SEQ ID NO: 14230 - RNA, 21 nt, Artificial Sequence
  SAMD9 targeting guide sequence portion
guacagaucugaagagcuaga

SEQ ID NO: 14231 - RNA, 21 nt, Artificial Sequence
  SAMD9 targeting guide sequence portion
guacaugcaguauuuaauuuc

SEQ ID NO: 14232 - RNA, 21 nt, Artificial Sequence
  SAMD9 targeting guide sequence portion
guacugagaucaaauucuugg

SEQ ID NO: 14233 - RNA, 21 nt, Artificial Sequence
  SAMD9 targeting guide sequence portion
guagaacucauaacauguuua

SEQ ID NO: 14234 - RNA, 21 nt, Artificial Sequence
  SAMD9 targeting guide sequence portion
guagacaaucuucuucaaucc

SEQ ID NO: 14235 - RNA, 21 nt, Artificial Sequence
  SAMD9 targeting guide sequence portion
guagcaaauauguuccuuggu

SEQ ID NO: 14236 - RNA, 21 nt, Artificial Sequence
  SAMD9 targeting guide sequence portion
guagccagcuuauuacacuaa

SEQ ID NO: 14237 - RNA, 21 nt, Artificial Sequence
  SAMD9 targeting guide sequence portion
guagugggguucuguguagcc

SEQ ID NO: 14238 - RNA, 21 nt, Artificial Sequence
  SAMD9 targeting guide sequence portion
guaucaugugcuuggcacuca

SEQ ID NO: 14239 - RNA, 21 nt, Artificial Sequence
  SAMD9 targeting guide sequence portion
guaucuauaaccuugccgguu

SEQ ID NO: 14240 - RNA, 21 nt, Artificial Sequence
  SAMD9 targeting guide sequence portion
guauuuaauuuccucuuaaac

SEQ ID NO: 14241 - RNA, 21 nt, Artificial Sequence
  SAMD9 targeting guide sequence portion
gucaggagaaguuaguguaau

SEQ ID NO: 14242 - RNA, 21 nt, Artificial Sequence
  SAMD9 targeting guide sequence portion
gucauagcuccuuauuauuuu

SEQ ID NO: 14243 - RNA, 21 nt, Artificial Sequence
  SAMD9 targeting guide sequence portion
gucaucaaugauguuaaccaa

SEQ ID NO: 14244 - RNA, 21 nt, Artificial Sequence
  SAMD9 targeting guide sequence portion
guccucuguuuuggaagaucc

SEQ ID NO: 14245 - RNA, 21 nt, Artificial Sequence
  SAMD9 targeting guide sequence portion
gucuaaaugccauuugaguag

SEQ ID NO: 14246 - RNA, 21 nt, Artificial Sequence
  SAMD9 targeting guide sequence portion
gucuacucaaauggcauuuag

SEQ ID NO: 14247 - RNA, 21 nt, Artificial Sequence
  SAMD9 targeting guide sequence portion
gucugggaaaauauuucucaa

SEQ ID NO: 14248 - RNA, 21 nt, Artificial Sequence
  SAMD9 targeting guide sequence portion
gucuuugagaaauauuuuccc

SEQ ID NO: 14249 - RNA, 21 nt, Artificial Sequence
  SAMD9 targeting guide sequence portion
gucuuuguagaacucauaaca

SEQ ID NO: 14250 - RNA, 21 nt, Artificial Sequence
  SAMD9 targeting guide sequence portion
gugaaaaaggaaggagugaga

SEQ ID NO: 14251 - RNA, 21 nt, Artificial Sequence
  SAMD9 targeting guide sequence portion
gugagauauaugaaaaguagc

SEQ ID NO: 14252 - RNA, 21 nt, Artificial Sequence
  SAMD9 targeting guide sequence portion
gugccaagcacaugauacauu

SEQ ID NO: 14253 - RNA, 21 nt, Artificial Sequence
  SAMD9 targeting guide sequence portion
gugcuuggcacucaaggaucu

SEQ ID NO: 14254 - RNA, 21 nt, Artificial Sequence
  SAMD9 targeting guide sequence portion
gugggguucuguguagccagc

SEQ ID NO: 14255 - RNA, 21 nt, Artificial Sequence
  SAMD9 targeting guide sequence portion
guguaauaagcuggcuacaca

SEQ ID NO: 14256 - RNA, 21 nt, Artificial Sequence
  SAMD9 targeting guide sequence portion
guguagccagcuuauuacacu

SEQ ID NO: 14257 - RNA, 21 nt, Artificial Sequence
  SAMD9 targeting guide sequence portion
guuaacaucauugaugacaaa

SEQ ID NO: 14258 - RNA, 21 nt, Artificial Sequence
  SAMD9 targeting guide sequence portion
guuaaccaaaccaaggaacau

SEQ ID NO: 14259 - RNA, 21 nt, Artificial Sequence
  SAMD9 targeting guide sequence portion
guuaguguaauaagcuggcua

SEQ ID NO: 14260 - RNA, 21 nt, Artificial Sequence
  SAMD9 targeting guide sequence portion
guuauagauacagccucuagc

SEQ ID NO: 14261 - RNA, 21 nt, Artificial Sequence
  SAMD9 targeting guide sequence portion
guuaugaguucuacaaagaca

SEQ ID NO: 14262 - RNA, 21 nt, Artificial Sequence
  SAMD9 targeting guide sequence portion
guuccuugguuugguuaacau

SEQ ID NO: 14263 - RNA, 21 nt, Artificial Sequence
  SAMD9 targeting guide sequence portion
guucuacaaagacaauaguga

SEQ ID NO: 14264 - RNA, 21 nt, Artificial Sequence
  SAMD9 targeting guide sequence portion
guucuguguagccagcuuauu

SEQ ID NO: 14265 - RNA, 21 nt, Artificial Sequence
  SAMD9 targeting guide sequence portion
guugcuccucaguuugagagg

SEQ ID NO: 14266 - RNA, 21 nt, Artificial Sequence
  SAMD9 targeting guide sequence portion
guuuaaagcauagaucuugag

SEQ ID NO: 14267 - RNA, 21 nt, Artificial Sequence
  SAMD9 targeting guide sequence portion
guuuaagaggaaauuaaauac

SEQ ID NO: 14268 - RNA, 21 nt, Artificial Sequence
  SAMD9 targeting guide sequence portion
guuugagagguuuuugcuguc

SEQ ID NO: 14269 - RNA, 21 nt, Artificial Sequence
  SAMD9 targeting guide sequence portion
guuugguuaacaucauugaug

SEQ ID NO: 14270 - RNA, 21 nt, Artificial Sequence
  SAMD9 targeting guide sequence portion
guuuuggaagauccuugagug

SEQ ID NO: 14271 - RNA, 21 nt, Artificial Sequence
  SAMD9 targeting guide sequence portion
guuuuugcugucuuugagaaa

SEQ ID NO: 14272 - RNA, 21 nt, Artificial Sequence
  SAMD9 targeting guide sequence portion
uaaacauguuaugaguucuac

SEQ ID NO: 14273 - RNA, 21 nt, Artificial Sequence
  SAMD9 targeting guide sequence portion
uaaaccggcaagguuauagau

SEQ ID NO: 14274 - RNA, 21 nt, Artificial Sequence
  SAMD9 targeting guide sequence portion
uaaagcauagaucuugagucc

SEQ ID NO: 14275 - RNA, 21 nt, Artificial Sequence
  SAMD9 targeting guide sequence portion
uaaauacugcauguacagauc

SEQ ID NO: 14276 - RNA, 21 nt, Artificial Sequence
  SAMD9 targeting guide sequence portion
uaaaugccauuugaguagaca

SEQ ID NO: 14277 - RNA, 21 nt, Artificial Sequence
  SAMD9 targeting guide sequence portion
uaaauggguacugagaucaaa

SEQ ID NO: 14278 - RNA, 21 nt, Artificial Sequence
  SAMD9 targeting guide sequence portion
uaaauguugcuccucaguuug

SEQ ID NO: 14279 - RNA, 21 nt, Artificial Sequence
  SAMD9 targeting guide sequence portion
uaacaucauugaugacaaaau

SEQ ID NO: 14280 - RNA, 21 nt, Artificial Sequence
  SAMD9 targeting guide sequence portion
uaacauguuuaagaggaaauu

SEQ ID NO: 14281 - RNA, 21 nt, Artificial Sequence
  SAMD9 targeting guide sequence portion
uaaccaaaccaaggaacauau

SEQ ID NO: 14282 - RNA, 21 nt, Artificial Sequence
  SAMD9 targeting guide sequence portion
uaaccuugccgguuuaaagca

SEQ ID NO: 14283 - RNA, 21 nt, Artificial Sequence
  SAMD9 targeting guide sequence portion
uaacuucuccugacuccaguc

SEQ ID NO: 14284 - RNA, 21 nt, Artificial Sequence
  SAMD9 targeting guide sequence portion
uaagaauaaauguugcuccuc

SEQ ID NO: 14285 - RNA, 21 nt, Artificial Sequence
  SAMD9 targeting guide sequence portion
uaagaggaaauuaaauacugc

SEQ ID NO: 14286 - RNA, 21 nt, Artificial Sequence
  SAMD9 targeting guide sequence portion
uaagcagaucaucaauguauc

SEQ ID NO: 14287 - RNA, 21 nt, Artificial Sequence
  SAMD9 targeting guide sequence portion
uaagcuggcuacacagaaccc

SEQ ID NO: 14288 - RNA, 21 nt, Artificial Sequence
  SAMD9 targeting guide sequence portion
uaaggagcuaugacuggaguc

SEQ ID NO: 14289 - RNA, 21 nt, Artificial Sequence
  SAMD9 targeting guide sequence portion
uaaguagugggguucugugua

SEQ ID NO: 14290 - RNA, 21 nt, Artificial Sequence
  SAMD9 targeting guide sequence portion
uaauaagcuggcuacacagaa

SEQ ID NO: 14291 - RNA, 21 nt, Artificial Sequence
  SAMD9 targeting guide sequence portion
uaauaaggagcuaugacugga

SEQ ID NO: 14292 - RNA, 21 nt, Artificial Sequence
  SAMD9 targeting guide sequence portion
uaaugucuaaaugccauuuga

SEQ ID NO: 14293 - RNA, 21 nt, Artificial Sequence
  SAMD9 targeting guide sequence portion
uaauuuccucuuaaacauguu

SEQ ID NO: 14294 - RNA, 21 nt, Artificial Sequence
  SAMD9 targeting guide sequence portion
uacaaagacaauagugaaaaa

SEQ ID NO: 14295 - RNA, 21 nt, Artificial Sequence
  SAMD9 targeting guide sequence portion
uacacagaaccccacuacuua

SEQ ID NO: 14296 - RNA, 21 nt, Artificial Sequence
  SAMD9 targeting guide sequence portion
uacacuaacuucuccugacuc

SEQ ID NO: 14297 - RNA, 21 nt, Artificial Sequence
  SAMD9 targeting guide sequence portion
uacagaucugaagagcuagag

SEQ ID NO: 14298 - RNA, 21 nt, Artificial Sequence
  SAMD9 targeting guide sequence portion
uacagccucuagcucuucaga

SEQ ID NO: 14299 - RNA, 21 nt, Artificial Sequence
  SAMD9 targeting guide sequence portion
uacaugcaguauuuaauuucc

SEQ ID NO: 14300 - RNA, 21 nt, Artificial Sequence
  SAMD9 targeting guide sequence portion
uacauugaugaucugcuuagu

SEQ ID NO: 14301 - RNA, 21 nt, Artificial Sequence
  SAMD9 targeting guide sequence portion
uaccaggcauggauugaagaa

SEQ ID NO: 14302 - RNA, 21 nt, Artificial Sequence
  SAMD9 targeting guide sequence portion
uacuaagcagaucaucaaugu

SEQ ID NO: 14303 - RNA, 21 nt, Artificial Sequence
  SAMD9 targeting guide sequence portion
uacucaaauggcauuuagaca

SEQ ID NO: 14304 - RNA, 21 nt, Artificial Sequence
  SAMD9 targeting guide sequence portion
uacugagaucaaauucuugga

SEQ ID NO: 14305 - RNA, 21 nt, Artificial Sequence
  SAMD9 targeting guide sequence portion
uacugcauguacagaucugaa

SEQ ID NO: 14306 - RNA, 21 nt, Artificial Sequence
  SAMD9 targeting guide sequence portion
uacuuaccaggcauggauuga

SEQ ID NO: 14307 - RNA, 21 nt, Artificial Sequence
  SAMD9 targeting guide sequence portion
uacuuuucauauaucucacuc

SEQ ID NO: 14308 - RNA, 21 nt, Artificial Sequence
  SAMD9 targeting guide sequence portion
uagaacucauaacauguuuaa

SEQ ID NO: 14309 - RNA, 21 nt, Artificial Sequence
  SAMD9 targeting guide sequence portion
uagaaugucugggaaaauauu

SEQ ID NO: 14310 - RNA, 21 nt, Artificial Sequence
  SAMD9 targeting guide sequence portion
uagacaaucuucuucaaucca

SEQ ID NO: 14311 - RNA, 21 nt, Artificial Sequence
  SAMD9 targeting guide sequence portion
uagacauuagaaugucuggga

SEQ ID NO: 14312 - RNA, 21 nt, Artificial Sequence
  SAMD9 targeting guide sequence portion
uagaggcuguaucuauaaccu

SEQ ID NO: 14313 - RNA, 21 nt, Artificial Sequence
  SAMD9 targeting guide sequence portion
uagauacagccucuagcucuu

SEQ ID NO: 14314 - RNA, 21 nt, Artificial Sequence
  SAMD9 targeting guide sequence portion
uagcaaauauguuccuugguu

SEQ ID NO: 14315 - RNA, 21 nt, Artificial Sequence
  SAMD9 targeting guide sequence portion
uagccagcuuauuacacuaac

SEQ ID NO: 14316 - RNA, 21 nt, Artificial Sequence
  SAMD9 targeting guide sequence portion
uagcuccuuauuauuuuguca

SEQ ID NO: 14317 - RNA, 21 nt, Artificial Sequence
  SAMD9 targeting guide sequence portion
uagcucuucagaucuguacau

SEQ ID NO: 14318 - RNA, 21 nt, Artificial Sequence
  SAMD9 targeting guide sequence portion
uaguaagaauaaauguugcuc

SEQ ID NO: 14319 - RNA, 21 nt, Artificial Sequence
  SAMD9 targeting guide sequence portion
uagugaaaaaggaaggaguga

SEQ ID NO: 14320 - RNA, 21 nt, Artificial Sequence
  SAMD9 targeting guide sequence portion
uagugggguucuguguagcca

SEQ ID NO: 14321 - RNA, 21 nt, Artificial Sequence
  SAMD9 targeting guide sequence portion
uaguguaauaagcuggcuaca

SEQ ID NO: 14322 - RNA, 21 nt, Artificial Sequence
  SAMD9 targeting guide sequence portion
uauaaccuugccgguuuaaag

SEQ ID NO: 14323 - RNA, 21 nt, Artificial Sequence
  SAMD9 targeting guide sequence portion
uauagauacagccucuagcuc

SEQ ID NO: 14324 - RNA, 21 nt, Artificial Sequence
  SAMD9 targeting guide sequence portion
uauaucucacuccuuccuuuu

SEQ ID NO: 14325 - RNA, 21 nt, Artificial Sequence
  SAMD9 targeting guide sequence portion
uauaugaaaaguagcaaauau

SEQ ID NO: 14326 - RNA, 21 nt, Artificial Sequence
  SAMD9 targeting guide sequence portion
uaucaugugcuuggcacucaa

SEQ ID NO: 14327 - RNA, 21 nt, Artificial Sequence
  SAMD9 targeting guide sequence portion
uaucuauaaccuugccgguuu

SEQ ID NO: 14328 - RNA, 21 nt, Artificial Sequence
  SAMD9 targeting guide sequence portion
uaucucacuccuuccuuuuuc

SEQ ID NO: 14329 - RNA, 21 nt, Artificial Sequence
  SAMD9 targeting guide sequence portion
uaugaaaaguagcaaauaugu

SEQ ID NO: 14330 - RNA, 21 nt, Artificial Sequence
  SAMD9 targeting guide sequence portion
uaugacuggagucaggagaag

SEQ ID NO: 14331 - RNA, 21 nt, Artificial Sequence
  SAMD9 targeting guide sequence portion
uaugaguucuacaaagacaau

SEQ ID NO: 14332 - RNA, 21 nt, Artificial Sequence
  SAMD9 targeting guide sequence portion
uaugcuuuaaaccggcaaggu

SEQ ID NO: 14333 - RNA, 21 nt, Artificial Sequence
  SAMD9 targeting guide sequence portion
uauguuccuugguuugguuaa

SEQ ID NO: 14334 - RNA, 21 nt, Artificial Sequence
  SAMD9 targeting guide sequence portion
uauuacacuaacuucuccuga

SEQ ID NO: 14335 - RNA, 21 nt, Artificial Sequence
  SAMD9 targeting guide sequence portion
uauuauuuugucaucaaugau

SEQ ID NO: 14336 - RNA, 21 nt, Artificial Sequence
  SAMD9 targeting guide sequence portion
uauucuuacuaagcagaucau

SEQ ID NO: 14337 - RNA, 21 nt, Artificial Sequence
  SAMD9 targeting guide sequence portion
uauucuuccuccaagaauuug

SEQ ID NO: 14338 - RNA, 21 nt, Artificial Sequence
  SAMD9 targeting guide sequence portion
uauugucuuuguagaacucau

SEQ ID NO: 14339 - RNA, 21 nt, Artificial Sequence
  SAMD9 targeting guide sequence portion
uauuucucaaagacagcaaaa

SEQ ID NO: 14340 - RNA, 21 nt, Artificial Sequence
  SAMD9 targeting guide sequence portion
uauuugcuacuuuucauauau

SEQ ID NO: 14341 - RNA, 21 nt, Artificial Sequence
  SAMD9 targeting guide sequence portion
uauuuucccagacauucuaau

SEQ ID NO: 14342 - RNA, 21 nt, Artificial Sequence
  SAMD9 targeting guide sequence portion
uauuuugucaucaaugauguu

SEQ ID NO: 14343 - RNA, 21 nt, Artificial Sequence
  SAMD9 targeting guide sequence portion
ucaaacugaggagcaacauuu

SEQ ID NO: 14344 - RNA, 21 nt, Artificial Sequence
  SAMD9 targeting guide sequence portion
ucaaagacagcaaaaaccucu

SEQ ID NO: 14345 - RNA, 21 nt, Artificial Sequence
  SAMD9 targeting guide sequence portion
ucaaauggcauuuagacauua

SEQ ID NO: 14346 - RNA, 21 nt, Artificial Sequence
  SAMD9 targeting guide sequence portion
ucaaauucuuggaggaagaau

SEQ ID NO: 14347 - RNA, 21 nt, Artificial Sequence
  SAMD9 targeting guide sequence portion
ucaagaucuaugcuuuaaacc

SEQ ID NO: 14348 - RNA, 21 nt, Artificial Sequence
  SAMD9 targeting guide sequence portion
ucaauccaugccugguaagua

SEQ ID NO: 14349 - RNA, 21 nt, Artificial Sequence
  SAMD9 targeting guide sequence portion
ucaaugauguuaaccaaacca

SEQ ID NO: 14350 - RNA, 21 nt, Artificial Sequence
  SAMD9 targeting guide sequence portion
ucaauguaucaugugcuuggc

SEQ ID NO: 14351 - RNA, 21 nt, Artificial Sequence
  SAMD9 targeting guide sequence portion
ucacuauugucuuuguagaac

SEQ ID NO: 14352 - RNA, 21 nt, Artificial Sequence
  SAMD9 targeting guide sequence portion
ucacuccuuccuuuuucacua

SEQ ID NO: 14353 - RNA, 21 nt, Artificial Sequence
  SAMD9 targeting guide sequence portion
ucagaucuguacaugcaguau

SEQ ID NO: 14354 - RNA, 21 nt, Artificial Sequence
  SAMD9 targeting guide sequence portion
ucaggagaaguuaguguaaua

SEQ ID NO: 14355 - RNA, 21 nt, Artificial Sequence
  SAMD9 targeting guide sequence portion
ucaguuugagagguuuuugcu

SEQ ID NO: 14356 - RNA, 21 nt, Artificial Sequence
  SAMD9 targeting guide sequence portion
ucauaacauguuuaagaggaa

SEQ ID NO: 14357 - RNA, 21 nt, Artificial Sequence
  SAMD9 targeting guide sequence portion
ucauagcuccuuauuauuuug

SEQ ID NO: 14358 - RNA, 21 nt, Artificial Sequence
  SAMD9 targeting guide sequence portion
ucauauaucucacuccuuccu

SEQ ID NO: 14359 - RNA, 21 nt, Artificial Sequence
  SAMD9 targeting guide sequence portion
ucaucaaugauguuaaccaaa

SEQ ID NO: 14360 - RNA, 21 nt, Artificial Sequence
  SAMD9 targeting guide sequence portion
ucaucaauguaucaugugcuu

SEQ ID NO: 14361 - RNA, 21 nt, Artificial Sequence
  SAMD9 targeting guide sequence portion
ucaugugcuuggcacucaagg

SEQ ID NO: 14362 - RNA, 21 nt, Artificial Sequence
  SAMD9 targeting guide sequence portion
ucauugaugacaaaauaauaa

SEQ ID NO: 14363 - RNA, 21 nt, Artificial Sequence
  SAMD9 targeting guide sequence portion
uccaagaauuugaucucagua

SEQ ID NO: 14364 - RNA, 21 nt, Artificial Sequence
  SAMD9 targeting guide sequence portion
uccagucauagcuccuuauua

SEQ ID NO: 14365 - RNA, 21 nt, Artificial Sequence
  SAMD9 targeting guide sequence portion
uccaugccugguaaguagugg

SEQ ID NO: 14366 - RNA, 21 nt, Artificial Sequence
  SAMD9 targeting guide sequence portion
ucccagacauucuaaugucua

SEQ ID NO: 14367 - RNA, 21 nt, Artificial Sequence
  SAMD9 targeting guide sequence portion
uccucaguuugagagguuuuu

SEQ ID NO: 14368 - RNA, 21 nt, Artificial Sequence
  SAMD9 targeting guide sequence portion
uccuccaagaauuugaucuca

SEQ ID NO: 14369 - RNA, 21 nt, Artificial Sequence
  SAMD9 targeting guide sequence portion
uccucuguuuuggaagauccu

SEQ ID NO: 14370 - RNA, 21 nt, Artificial Sequence
  SAMD9 targeting guide sequence portion
uccucuuaaacauguuaugag

SEQ ID NO: 14371 - RNA, 21 nt, Artificial Sequence
  SAMD9 targeting guide sequence portion
uccugacuccagucauagcuc

SEQ ID NO: 14372 - RNA, 21 nt, Artificial Sequence
  SAMD9 targeting guide sequence portion
uccuuauuauuuugucaucaa

SEQ ID NO: 14373 - RNA, 21 nt, Artificial Sequence
  SAMD9 targeting guide sequence portion
uccuuccuuuuucacuauugu

SEQ ID NO: 14374 - RNA, 21 nt, Artificial Sequence
  SAMD9 targeting guide sequence portion
uccuugagugccaagcacaug

SEQ ID NO: 14375 - RNA, 21 nt, Artificial Sequence
  SAMD9 targeting guide sequence portion
uccuugguuugguuaacauca

SEQ ID NO: 14376 - RNA, 21 nt, Artificial Sequence
  SAMD9 targeting guide sequence portion
uccuuuuucacuauugucuuu

SEQ ID NO: 14377 - RNA, 21 nt, Artificial Sequence
  SAMD9 targeting guide sequence portion
ucuaaaugccauuugaguaga

SEQ ID NO: 14378 - RNA, 21 nt, Artificial Sequence
  SAMD9 targeting guide sequence portion
ucuaaugucuaaaugccauuu

SEQ ID NO: 14379 - RNA, 21 nt, Artificial Sequence
  SAMD9 targeting guide sequence portion
ucuacaaagacaauagugaaa

SEQ ID NO: 14380 - RNA, 21 nt, Artificial Sequence
  SAMD9 targeting guide sequence portion
ucuacucaaauggcauuuaga

SEQ ID NO: 14381 - RNA, 21 nt, Artificial Sequence
  SAMD9 targeting guide sequence portion
ucuagcucuucagaucuguac

SEQ ID NO: 14382 - RNA, 21 nt, Artificial Sequence
  SAMD9 targeting guide sequence portion
ucuauaaccuugccgguuuaa

SEQ ID NO: 14383 - RNA, 21 nt, Artificial Sequence
  SAMD9 targeting guide sequence portion
ucuaugcuuuaaaccggcaag

SEQ ID NO: 14384 - RNA, 21 nt, Artificial Sequence
  SAMD9 targeting guide sequence portion
ucucaaacugaggagcaacau

SEQ ID NO: 14385 - RNA, 21 nt, Artificial Sequence
  SAMD9 targeting guide sequence portion
ucucaaagacagcaaaaaccu

SEQ ID NO: 14386 - RNA, 21 nt, Artificial Sequence
  SAMD9 targeting guide sequence portion
ucucacuccuuccuuuuucac

SEQ ID NO: 14387 - RNA, 21 nt, Artificial Sequence
  SAMD9 targeting guide sequence portion
ucuccugacuccagucauagc

SEQ ID NO: 14388 - RNA, 21 nt, Artificial Sequence
  SAMD9 targeting guide sequence portion
ucugaagagcuagaggcugua

SEQ ID NO: 14389 - RNA, 21 nt, Artificial Sequence
  SAMD9 targeting guide sequence portion
ucugcuuaguaagaauaaaug

SEQ ID NO: 14390 - RNA, 21 nt, Artificial Sequence
  SAMD9 targeting guide sequence portion
ucugggaaaauauuucucaaa

SEQ ID NO: 14391 - RNA, 21 nt, Artificial Sequence
  SAMD9 targeting guide sequence portion
ucuguacaugcaguauuuaau

SEQ ID NO: 14392 - RNA, 21 nt, Artificial Sequence
  SAMD9 targeting guide sequence portion
ucuguguagccagcuuauuac

SEQ ID NO: 14393 - RNA, 21 nt, Artificial Sequence
  SAMD9 targeting guide sequence portion
ucuguuuuggaagauccuuga

SEQ ID NO: 14394 - RNA, 21 nt, Artificial Sequence
  SAMD9 targeting guide sequence portion
ucuuaaacauguuaugaguuc

SEQ ID NO: 14395 - RNA, 21 nt, Artificial Sequence
  SAMD9 targeting guide sequence portion
ucuuacuaagcagaucaucaa

SEQ ID NO: 14396 - RNA, 21 nt, Artificial Sequence
  SAMD9 targeting guide sequence portion
ucuucaauccaugccugguaa

SEQ ID NO: 14397 - RNA, 21 nt, Artificial Sequence
  SAMD9 targeting guide sequence portion
ucuucagaucuguacaugcag

SEQ ID NO: 14398 - RNA, 21 nt, Artificial Sequence
  SAMD9 targeting guide sequence portion
ucuuccuccaagaauuugauc

SEQ ID NO: 14399 - RNA, 21 nt, Artificial Sequence
  SAMD9 targeting guide sequence portion
ucuucuucaauccaugccugg

SEQ ID NO: 14400 - RNA, 21 nt, Artificial Sequence
  SAMD9 targeting guide sequence portion
ucuuugagaaauauuuuccca

SEQ ID NO: 14401 - RNA, 21 nt, Artificial Sequence
  SAMD9 targeting guide sequence portion
ucuuuguagaacucauaacau

SEQ ID NO: 14402 - RNA, 21 nt, Artificial Sequence
  SAMD9 targeting guide sequence portion
ugaaaaaggaaggagugagau

SEQ ID NO: 14403 - RNA, 21 nt, Artificial Sequence
  SAMD9 targeting guide sequence portion
ugaaaaguagcaaauauguuc

SEQ ID NO: 14404 - RNA, 21 nt, Artificial Sequence
  SAMD9 targeting guide sequence portion
ugaagaagauugucuacucaa

SEQ ID NO: 14405 - RNA, 21 nt, Artificial Sequence
  SAMD9 targeting guide sequence portion
ugaagagcuagaggcuguauc

SEQ ID NO: 14406 - RNA, 21 nt, Artificial Sequence
  SAMD9 targeting guide sequence portion
ugacaaaauaauaaggagcua

SEQ ID NO: 14407 - RNA, 21 nt, Artificial Sequence
  SAMD9 targeting guide sequence portion
ugacuccagucauagcuccuu

SEQ ID NO: 14408 - RNA, 21 nt, Artificial Sequence
  SAMD9 targeting guide sequence portion
ugacuggagucaggagaaguu

SEQ ID NO: 14409 - RNA, 21 nt, Artificial Sequence
  SAMD9 targeting guide sequence portion
ugagaaauauuuucccagaca

SEQ ID NO: 14410 - RNA, 21 nt, Artificial Sequence
  SAMD9 targeting guide sequence portion
ugagagguuuuugcugucuuu

SEQ ID NO: 14411 - RNA, 21 nt, Artificial Sequence
  SAMD9 targeting guide sequence portion
ugagauauaugaaaaguagca

SEQ ID NO: 14412 - RNA, 21 nt, Artificial Sequence
  SAMD9 targeting guide sequence portion
ugagaucaaauucuuggagga

SEQ ID NO: 14413 - RNA, 21 nt, Artificial Sequence
  SAMD9 targeting guide sequence portion
ugaggagcaacauuuauucuu

SEQ ID NO: 14414 - RNA, 21 nt, Artificial Sequence
  SAMD9 targeting guide sequence portion
ugaguagacaaucuucuucaa

SEQ ID NO: 14415 - RNA, 21 nt, Artificial Sequence
  SAMD9 targeting guide sequence portion
ugagugccaagcacaugauac

SEQ ID NO: 14416 - RNA, 21 nt, Artificial Sequence
  SAMD9 targeting guide sequence portion
ugaguucuacaaagacaauag

SEQ ID NO: 14417 - RNA, 21 nt, Artificial Sequence
  SAMD9 targeting guide sequence portion
ugauacauugaugaucugcuu

SEQ ID NO: 14418 - RNA, 21 nt, Artificial Sequence
  SAMD9 targeting guide sequence portion
ugauauucuuccuccaagaau

SEQ ID NO: 14419 - RNA, 21 nt, Artificial Sequence
  SAMD9 targeting guide sequence portion
ugaucugcuuaguaagaauaa

SEQ ID NO: 14420 - RNA, 21 nt, Artificial Sequence
  SAMD9 targeting guide sequence portion
ugaugacaaaauaauaaggag

SEQ ID NO: 14421 - RNA, 21 nt, Artificial Sequence
  SAMD9 targeting guide sequence portion
ugaugaucugcuuaguaagaa

SEQ ID NO: 14422 - RNA, 21 nt, Artificial Sequence
  SAMD9 targeting guide sequence portion
ugauguuaaccaaaccaagga

SEQ ID NO: 14423 - RNA, 21 nt, Artificial Sequence
  SAMD9 targeting guide sequence portion
ugcaguauuuaauuuccucuu

SEQ ID NO: 14424 - RNA, 21 nt, Artificial Sequence
  SAMD9 targeting guide sequence portion
ugcauguacagaucugaagag

SEQ ID NO: 14425 - RNA, 21 nt, Artificial Sequence
  SAMD9 targeting guide sequence portion
ugccaagcacaugauacauug

SEQ ID NO: 14426 - RNA, 21 nt, Artificial Sequence
  SAMD9 targeting guide sequence portion
ugccauuugaguagacaaucu

SEQ ID NO: 14427 - RNA, 21 nt, Artificial Sequence
  SAMD9 targeting guide sequence portion
ugccgguuuaaagcauagauc

SEQ ID NO: 14428 - RNA, 21 nt, Artificial Sequence
  SAMD9 targeting guide sequence portion
ugccugguaaguagugggguu

SEQ ID NO: 14429 - RNA, 21 nt, Artificial Sequence
  SAMD9 targeting guide sequence portion
ugcuacuuuucauauaucuca

SEQ ID NO: 14430 - RNA, 21 nt, Artificial Sequence
  SAMD9 targeting guide sequence portion
ugcuccucaguuugagagguu

SEQ ID NO: 14431 - RNA, 21 nt, Artificial Sequence
  SAMD9 targeting guide sequence portion
ugcugucuuugagaaauauuu

SEQ ID NO: 14432 - RNA, 21 nt, Artificial Sequence
  SAMD9 targeting guide sequence portion
ugcuuaguaagaauaaauguu

SEQ ID NO: 14433 - RNA, 21 nt, Artificial Sequence
  SAMD9 targeting guide sequence portion
ugcuuggcacucaaggaucuu

SEQ ID NO: 14434 - RNA, 21 nt, Artificial Sequence
  SAMD9 targeting guide sequence portion
ugcuuuaaaccggcaagguua

SEQ ID NO: 14435 - RNA, 21 nt, Artificial Sequence
  SAMD9 targeting guide sequence portion
uggaagauccuugagugccaa

SEQ ID NO: 14436 - RNA, 21 nt, Artificial Sequence
  SAMD9 targeting guide sequence portion
uggacucaagaucuaugcuuu

SEQ ID NO: 14437 - RNA, 21 nt, Artificial Sequence
  SAMD9 targeting guide sequence portion
uggagucaggagaaguuagug

SEQ ID NO: 14438 - RNA, 21 nt, Artificial Sequence
  SAMD9 targeting guide sequence portion
uggauugaagaagauugucua

SEQ ID NO: 14439 - RNA, 21 nt, Artificial Sequence
  SAMD9 targeting guide sequence portion
uggcacucaaggaucuuccaa

SEQ ID NO: 14440 - RNA, 21 nt, Artificial Sequence
  SAMD9 targeting guide sequence portion
uggcauuuagacauuagaaug

SEQ ID NO: 14441 - RNA, 21 nt, Artificial Sequence
  SAMD9 targeting guide sequence portion
uggcuacacagaaccccacua

SEQ ID NO: 14442 - RNA, 21 nt, Artificial Sequence
  SAMD9 targeting guide sequence portion
ugggaaaauauuucucaaaga

SEQ ID NO: 14443 - RNA, 21 nt, Artificial Sequence
  SAMD9 targeting guide sequence portion
ugggguucuguguagccagcu

SEQ ID NO: 14444 - RNA, 21 nt, Artificial Sequence
  SAMD9 targeting guide sequence portion
uggguacugagaucaaauucu

SEQ ID NO: 14445 - RNA, 21 nt, Artificial Sequence
  SAMD9 targeting guide sequence portion
ugguaaguagugggguucugu

SEQ ID NO: 14446 - RNA, 21 nt, Artificial Sequence
  SAMD9 targeting guide sequence portion
ugguuaacaucauugaugaca

SEQ ID NO: 14447 - RNA, 21 nt, Artificial Sequence
  SAMD9 targeting guide sequence portion
ugguuugguuaacaucauuga

SEQ ID NO: 14448 - RNA, 21 nt, Artificial Sequence
  SAMD9 targeting guide sequence portion
uguaauaagcuggcuacacag

SEQ ID NO: 14449 - RNA, 21 nt, Artificial Sequence
  SAMD9 targeting guide sequence portion
uguacagaucugaagagcuag

SEQ ID NO: 14450 - RNA, 21 nt, Artificial Sequence
  SAMD9 targeting guide sequence portion
uguacaugcaguauuuaauuu

SEQ ID NO: 14451 - RNA, 21 nt, Artificial Sequence
  SAMD9 targeting guide sequence portion
uguagaacucauaacauguuu

SEQ ID NO: 14452 - RNA, 21 nt, Artificial Sequence
  SAMD9 targeting guide sequence portion
uguagccagcuuauuacacua

SEQ ID NO: 14453 - RNA, 21 nt, Artificial Sequence
  SAMD9 targeting guide sequence portion
uguaucaugugcuuggcacuc

SEQ ID NO: 14454 - RNA, 21 nt, Artificial Sequence
  SAMD9 targeting guide sequence portion
uguaucuauaaccuugccggu

SEQ ID NO: 14455 - RNA, 21 nt, Artificial Sequence
  SAMD9 targeting guide sequence portion
ugucaucaaugauguuaacca

SEQ ID NO: 14456 - RNA, 21 nt, Artificial Sequence
  SAMD9 targeting guide sequence portion
ugucuaaaugccauuugagua

SEQ ID NO: 14457 - RNA, 21 nt, Artificial Sequence
  SAMD9 targeting guide sequence portion
ugucuacucaaauggcauuua

SEQ ID NO: 14458 - RNA, 21 nt, Artificial Sequence
  SAMD9 targeting guide sequence portion
ugucugggaaaauauuucuca

SEQ ID NO: 14459 - RNA, 21 nt, Artificial Sequence
  SAMD9 targeting guide sequence portion
ugucuuugagaaauauuuucc

SEQ ID NO: 14460 - RNA, 21 nt, Artificial Sequence
  SAMD9 targeting guide sequence portion
ugucuuuguagaacucauaac

SEQ ID NO: 14461 - RNA, 21 nt, Artificial Sequence
  SAMD9 targeting guide sequence portion
ugugcuuggcacucaaggauc

SEQ ID NO: 14462 - RNA, 21 nt, Artificial Sequence
  SAMD9 targeting guide sequence portion
uguguagccagcuuauuacac

SEQ ID NO: 14463 - RNA, 21 nt, Artificial Sequence
  SAMD9 targeting guide sequence portion
uguuaaccaaaccaaggaaca

SEQ ID NO: 14464 - RNA, 21 nt, Artificial Sequence
  SAMD9 targeting guide sequence portion
uguuaugaguucuacaaagac

SEQ ID NO: 14465 - RNA, 21 nt, Artificial Sequence
  SAMD9 targeting guide sequence portion
uguuccuugguuugguuaaca

SEQ ID NO: 14466 - RNA, 21 nt, Artificial Sequence
  SAMD9 targeting guide sequence portion
uguugcuccucaguuugagag

SEQ ID NO: 14467 - RNA, 21 nt, Artificial Sequence
  SAMD9 targeting guide sequence portion
uguuuaagaggaaauuaaaua

SEQ ID NO: 14468 - RNA, 21 nt, Artificial Sequence
  SAMD9 targeting guide sequence portion
uguuuuggaagauccuugagu

SEQ ID NO: 14469 - RNA, 21 nt, Artificial Sequence
  SAMD9 targeting guide sequence portion
uuaaacauguuaugaguucua

SEQ ID NO: 14470 - RNA, 21 nt, Artificial Sequence
  SAMD9 targeting guide sequence portion
uuaaaccggcaagguuauaga

SEQ ID NO: 14471 - RNA, 21 nt, Artificial Sequence
  SAMD9 targeting guide sequence portion
uuaaagcauagaucuugaguc

SEQ ID NO: 14472 - RNA, 21 nt, Artificial Sequence
  SAMD9 targeting guide sequence portion
uuaaauacugcauguacagau

SEQ ID NO: 14473 - RNA, 21 nt, Artificial Sequence
  SAMD9 targeting guide sequence portion
uuaaauggguacugagaucaa

SEQ ID NO: 14474 - RNA, 21 nt, Artificial Sequence
  SAMD9 targeting guide sequence portion
uuaaccaaaccaaggaacaua

SEQ ID NO: 14475 - RNA, 21 nt, Artificial Sequence
  SAMD9 targeting guide sequence portion
uuaagaggaaauuaaauacug

SEQ ID NO: 14476 - RNA, 21 nt, Artificial Sequence
  SAMD9 targeting guide sequence portion
uuaauuuccucuuaaacaugu

SEQ ID NO: 14477 - RNA, 21 nt, Artificial Sequence
  SAMD9 targeting guide sequence portion
uuacacuaacuucuccugacu

SEQ ID NO: 14478 - RNA, 21 nt, Artificial Sequence
  SAMD9 targeting guide sequence portion
uuaccaggcauggauugaaga

SEQ ID NO: 14479 - RNA, 21 nt, Artificial Sequence
  SAMD9 targeting guide sequence portion
uuacuaagcagaucaucaaug

SEQ ID NO: 14480 - RNA, 21 nt, Artificial Sequence
  SAMD9 targeting guide sequence portion
uuagaaugucugggaaaauau

SEQ ID NO: 14481 - RNA, 21 nt, Artificial Sequence
  SAMD9 targeting guide sequence portion
uuagacauuagaaugucuggg

SEQ ID NO: 14482 - RNA, 21 nt, Artificial Sequence
  SAMD9 targeting guide sequence portion
uuaguaagaauaaauguugcu

SEQ ID NO: 14483 - RNA, 21 nt, Artificial Sequence
  SAMD9 targeting guide sequence portion
uuaguguaauaagcuggcuac

SEQ ID NO: 14484 - RNA, 21 nt, Artificial Sequence
  SAMD9 targeting guide sequence portion
uuauagauacagccucuagcu

SEQ ID NO: 14485 - RNA, 21 nt, Artificial Sequence
  SAMD9 targeting guide sequence portion
uuaugaguucuacaaagacaa

SEQ ID NO: 14486 - RNA, 21 nt, Artificial Sequence
  SAMD9 targeting guide sequence portion
uuauuacacuaacuucuccug

SEQ ID NO: 14487 - RNA, 21 nt, Artificial Sequence
  SAMD9 targeting guide sequence portion
uuauucuuacuaagcagauca

SEQ ID NO: 14488 - RNA, 21 nt, Artificial Sequence
  SAMD9 targeting guide sequence portion
uuauuuugucaucaaugaugu

SEQ ID NO: 14489 - RNA, 21 nt, Artificial Sequence
  SAMD9 targeting guide sequence portion
uucaauccaugccugguaagu

SEQ ID NO: 14490 - RNA, 21 nt, Artificial Sequence
  SAMD9 targeting guide sequence portion
uucacuauugucuuuguagaa

SEQ ID NO: 14491 - RNA, 21 nt, Artificial Sequence
  SAMD9 targeting guide sequence portion
uucagaucuguacaugcagua

SEQ ID NO: 14492 - RNA, 21 nt, Artificial Sequence
  SAMD9 targeting guide sequence portion
uucauauaucucacuccuucc

SEQ ID NO: 14493 - RNA, 21 nt, Artificial Sequence
  SAMD9 targeting guide sequence portion
uucccagacauucuaaugucu

SEQ ID NO: 14494 - RNA, 21 nt, Artificial Sequence
  SAMD9 targeting guide sequence portion
uuccuccaagaauuugaucuc

SEQ ID NO: 14495 - RNA, 21 nt, Artificial Sequence
  SAMD9 targeting guide sequence portion
uuccucuuaaacauguuauga

SEQ ID NO: 14496 - RNA, 21 nt, Artificial Sequence
  SAMD9 targeting guide sequence portion
uuccuugguuugguuaacauc

SEQ ID NO: 14497 - RNA, 21 nt, Artificial Sequence
  SAMD9 targeting guide sequence portion
uuccuuuuucacuauugucuu

SEQ ID NO: 14498 - RNA, 21 nt, Artificial Sequence
  SAMD9 targeting guide sequence portion
uucuaaugucuaaaugccauu

SEQ ID NO: 14499 - RNA, 21 nt, Artificial Sequence
  SAMD9 targeting guide sequence portion
uucuacaaagacaauagugaa

SEQ ID NO: 14500 - RNA, 21 nt, Artificial Sequence
  SAMD9 targeting guide sequence portion
uucucaaagacagcaaaaacc

SEQ ID NO: 14501 - RNA, 21 nt, Artificial Sequence
  SAMD9 targeting guide sequence portion
uucuccugacuccagucauag

SEQ ID NO: 14502 - RNA, 21 nt, Artificial Sequence
  SAMD9 targeting guide sequence portion
uucuguguagccagcuuauua

SEQ ID NO: 14503 - RNA, 21 nt, Artificial Sequence
  SAMD9 targeting guide sequence portion
uucuuacuaagcagaucauca

SEQ ID NO: 14504 - RNA, 21 nt, Artificial Sequence
  SAMD9 targeting guide sequence portion
uucuucaauccaugccuggua

SEQ ID NO: 14505 - RNA, 21 nt, Artificial Sequence
  SAMD9 targeting guide sequence portion
uucuuccuccaagaauuugau

SEQ ID NO: 14506 - RNA, 21 nt, Artificial Sequence
  SAMD9 targeting guide sequence portion
uugaagaagauugucuacuca

SEQ ID NO: 14507 - RNA, 21 nt, Artificial Sequence
  SAMD9 targeting guide sequence portion
uugagaaauauuuucccagac

SEQ ID NO: 14508 - RNA, 21 nt, Artificial Sequence
  SAMD9 targeting guide sequence portion
uugagagguuuuugcugucuu

SEQ ID NO: 14509 - RNA, 21 nt, Artificial Sequence
  SAMD9 targeting guide sequence portion
uugaguagacaaucuucuuca

SEQ ID NO: 14510 - RNA, 21 nt, Artificial Sequence
  SAMD9 targeting guide sequence portion
uugagugccaagcacaugaua

SEQ ID NO: 14511 - RNA, 21 nt, Artificial Sequence
  SAMD9 targeting guide sequence portion
uugaucucaguacccauuuaa

SEQ ID NO: 14512 - RNA, 21 nt, Artificial Sequence
  SAMD9 targeting guide sequence portion
uugaugacaaaauaauaagga

SEQ ID NO: 14513 - RNA, 21 nt, Artificial Sequence
  SAMD9 targeting guide sequence portion
uugaugaucugcuuaguaaga

SEQ ID NO: 14514 - RNA, 21 nt, Artificial Sequence
  SAMD9 targeting guide sequence portion
uugccgguuuaaagcauagau

SEQ ID NO: 14515 - RNA, 21 nt, Artificial Sequence
  SAMD9 targeting guide sequence portion
uugcuacuuuucauauaucuc

SEQ ID NO: 14516 - RNA, 21 nt, Artificial Sequence
  SAMD9 targeting guide sequence portion
uugcuccucaguuugagaggu

SEQ ID NO: 14517 - RNA, 21 nt, Artificial Sequence
  SAMD9 targeting guide sequence portion
uugcugucuuugagaaauauu

SEQ ID NO: 14518 - RNA, 21 nt, Artificial Sequence
  SAMD9 targeting guide sequence portion
uuggaagauccuugagugcca

SEQ ID NO: 14519 - RNA, 21 nt, Artificial Sequence
  SAMD9 targeting guide sequence portion
uuggacucaagaucuaugcuu

SEQ ID NO: 14520 - RNA, 21 nt, Artificial Sequence
  SAMD9 targeting guide sequence portion
uuggcacucaaggaucuucca

SEQ ID NO: 14521 - RNA, 21 nt, Artificial Sequence
  SAMD9 targeting guide sequence portion
uugguuaacaucauugaugac

SEQ ID NO: 14522 - RNA, 21 nt, Artificial Sequence
  SAMD9 targeting guide sequence portion
uugguuugguuaacaucauug

SEQ ID NO: 14523 - RNA, 21 nt, Artificial Sequence
  SAMD9 targeting guide sequence portion
uuguagaacucauaacauguu

SEQ ID NO: 14524 - RNA, 21 nt, Artificial Sequence
  SAMD9 targeting guide sequence portion
uugucaucaaugauguuaacc

SEQ ID NO: 14525 - RNA, 21 nt, Artificial Sequence
  SAMD9 targeting guide sequence portion
uugucuacucaaauggcauuu

SEQ ID NO: 14526 - RNA, 21 nt, Artificial Sequence
  SAMD9 targeting guide sequence portion
uugucuuuguagaacucauaa

SEQ ID NO: 14527 - RNA, 21 nt, Artificial Sequence
  SAMD9 targeting guide sequence portion
uuuaaaccggcaagguuauag

SEQ ID NO: 14528 - RNA, 21 nt, Artificial Sequence
  SAMD9 targeting guide sequence portion
uuuaaagcauagaucuugagu

SEQ ID NO: 14529 - RNA, 21 nt, Artificial Sequence
  SAMD9 targeting guide sequence portion
uuuaagaggaaauuaaauacu

SEQ ID NO: 14530 - RNA, 21 nt, Artificial Sequence
  SAMD9 targeting guide sequence portion
uuuaauuuccucuuaaacaug

SEQ ID NO: 14531 - RNA, 21 nt, Artificial Sequence
  SAMD9 targeting guide sequence portion
uuuagacauuagaaugucugg

SEQ ID NO: 14532 - RNA, 21 nt, Artificial Sequence
  SAMD9 targeting guide sequence portion
uuuauucuuacuaagcagauc

SEQ ID NO: 14533 - RNA, 21 nt, Artificial Sequence
  SAMD9 targeting guide sequence portion
uuucacuauugucuuuguaga

SEQ ID NO: 14534 - RNA, 21 nt, Artificial Sequence
  SAMD9 targeting guide sequence portion
uuucauauaucucacuccuuc

SEQ ID NO: 14535 - RNA, 21 nt, Artificial Sequence
  SAMD9 targeting guide sequence portion
uuucccagacauucuaauguc

SEQ ID NO: 14536 - RNA, 21 nt, Artificial Sequence
  SAMD9 targeting guide sequence portion
uuuccucuuaaacauguuaug

SEQ ID NO: 14537 - RNA, 21 nt, Artificial Sequence
  SAMD9 targeting guide sequence portion
uuucucaaagacagcaaaaac

SEQ ID NO: 14538 - RNA, 21 nt, Artificial Sequence
  SAMD9 targeting guide sequence portion
uuugagaaauauuuucccaga

SEQ ID NO: 14539 - RNA, 21 nt, Artificial Sequence
  SAMD9 targeting guide sequence portion
uuugagagguuuuugcugucu

SEQ ID NO: 14540 - RNA, 21 nt, Artificial Sequence
  SAMD9 targeting guide sequence portion
uuugaguagacaaucuucuuc

SEQ ID NO: 14541 - RNA, 21 nt, Artificial Sequence
  SAMD9 targeting guide sequence portion
uuugaucucaguacccauuua

SEQ ID NO: 14542 - RNA, 21 nt, Artificial Sequence
  SAMD9 targeting guide sequence portion
uuugcuacuuuucauauaucu

SEQ ID NO: 14543 - RNA, 21 nt, Artificial Sequence
  SAMD9 targeting guide sequence portion
uuugcugucuuugagaaauau

SEQ ID NO: 14544 - RNA, 21 nt, Artificial Sequence
  SAMD9 targeting guide sequence portion
uuuggaagauccuugagugcc

SEQ ID NO: 14545 - RNA, 21 nt, Artificial Sequence
  SAMD9 targeting guide sequence portion
uuuggacucaagaucuaugcu

SEQ ID NO: 14546 - RNA, 21 nt, Artificial Sequence
  SAMD9 targeting guide sequence portion
uuugguuaacaucauugauga

SEQ ID NO: 14547 - RNA, 21 nt, Artificial Sequence
  SAMD9 targeting guide sequence portion
uuuguagaacucauaacaugu

SEQ ID NO: 14548 - RNA, 21 nt, Artificial Sequence
  SAMD9 targeting guide sequence portion
uuugucaucaaugauguuaac

SEQ ID NO: 14549 - RNA, 21 nt, Artificial Sequence
  SAMD9 targeting guide sequence portion
uuuucacuauugucuuuguag

SEQ ID NO: 14550 - RNA, 21 nt, Artificial Sequence
  SAMD9 targeting guide sequence portion
uuuucauauaucucacuccuu

SEQ ID NO: 14551 - RNA, 21 nt, Artificial Sequence
  SAMD9 targeting guide sequence portion
uuuucccagacauucuaaugu

SEQ ID NO: 14552 - RNA, 21 nt, Artificial Sequence
  SAMD9 targeting guide sequence portion
uuuugcugucuuugagaaaua

SEQ ID NO: 14553 - RNA, 21 nt, Artificial Sequence
  SAMD9 targeting guide sequence portion
uuuuggaagauccuugagugc

SEQ ID NO: 14554 - RNA, 21 nt, Artificial Sequence
  SAMD9 targeting guide sequence portion
uuuuggacucaagaucuaugc

SEQ ID NO: 14555 - RNA, 21 nt, Artificial Sequence
  SAMD9 targeting guide sequence portion
uuuugucaucaaugauguuaa

SEQ ID NO: 14556 - RNA, 21 nt, Artificial Sequence
  SAMD9 targeting guide sequence portion
uuuuucacuauugucuuugua

SEQ ID NO: 14557 - RNA, 21 nt, Artificial Sequence
  SAMD9 targeting guide sequence portion
uuuuugcugucuuugagaaau

SEQ ID NO: 14558 - RNA, 21 nt, Artificial Sequence
  SAMD9 targeting guide sequence portion
uuuuuggacucaagaucuaug

SEQ ID NO: 14559 - RNA, 21 nt, Artificial Sequence
  SAMD9 targeting guide sequence portion
uuuuuuggacucaagaucuau

SEQ ID NO: 14560 - RNA, 22 nt, Artificial Sequence
  SAMD9 targeting guide sequence portion
aaaaaauuaaauggguacugag

SEQ ID NO: 14561 - RNA, 22 nt, Artificial Sequence
  SAMD9 targeting guide sequence portion
aaaaaccucucaaacugaggag

SEQ ID NO: 14562 - RNA, 22 nt, Artificial Sequence
  SAMD9 targeting guide sequence portion
aaaaaggaaggagugagauaua

SEQ ID NO: 14563 - RNA, 22 nt, Artificial Sequence
  SAMD9 targeting guide sequence portion
aaaaauuaaauggguacugaga

SEQ ID NO: 14564 - RNA, 22 nt, Artificial Sequence
  SAMD9 targeting guide sequence portion
aaaaccucucaaacugaggagc

SEQ ID NO: 14565 - RNA, 22 nt, Artificial Sequence
  SAMD9 targeting guide sequence portion
aaaaggaaggagugagauauau

SEQ ID NO: 14566 - RNA, 22 nt, Artificial Sequence
  SAMD9 targeting guide sequence portion
aaaaguagcaaauauguuccuu

SEQ ID NO: 14567 - RNA, 22 nt, Artificial Sequence
  SAMD9 targeting guide sequence portion
aaaauaauaaggagcuaugacu

SEQ ID NO: 14568 - RNA, 22 nt, Artificial Sequence
  SAMD9 targeting guide sequence portion
aaaauauuucucaaagacagca

SEQ ID NO: 14569 - RNA, 22 nt, Artificial Sequence
  SAMD9 targeting guide sequence portion
aaaauuaaauggguacugagau

SEQ ID NO: 14570 - RNA, 22 nt, Artificial Sequence
  SAMD9 targeting guide sequence portion
aaacauguuaugaguucuacaa

SEQ ID NO: 14571 - RNA, 22 nt, Artificial Sequence
  SAMD9 targeting guide sequence portion
aaaccaaggaacauauuugcua

SEQ ID NO: 14572 - RNA, 22 nt, Artificial Sequence
  SAMD9 targeting guide sequence portion
aaaccggcaagguuauagauac

SEQ ID NO: 14573 - RNA, 22 nt, Artificial Sequence
  SAMD9 targeting guide sequence portion
aaaccucucaaacugaggagca

SEQ ID NO: 14574 - RNA, 22 nt, Artificial Sequence
  SAMD9 targeting guide sequence portion
aaacugaggagcaacauuuauu

SEQ ID NO: 14575 - RNA, 22 nt, Artificial Sequence
  SAMD9 targeting guide sequence portion
aaagacaauagugaaaaaggaa

SEQ ID NO: 14576 - RNA, 22 nt, Artificial Sequence
  SAMD9 targeting guide sequence portion
aaagacagcaaaaaccucucaa

SEQ ID NO: 14577 - RNA, 22 nt, Artificial Sequence
  SAMD9 targeting guide sequence portion
aaaggaaggagugagauauaug

SEQ ID NO: 14578 - RNA, 22 nt, Artificial Sequence
  SAMD9 targeting guide sequence portion
aaaguagcaaauauguuccuug

SEQ ID NO: 14579 - RNA, 22 nt, Artificial Sequence
  SAMD9 targeting guide sequence portion
aaauaauaaggagcuaugacug

SEQ ID NO: 14580 - RNA, 22 nt, Artificial Sequence
  SAMD9 targeting guide sequence portion
aaauacugcauguacagaucug

SEQ ID NO: 14581 - RNA, 22 nt, Artificial Sequence
  SAMD9 targeting guide sequence portion
aaauauguuccuugguuugguu

SEQ ID NO: 14582 - RNA, 22 nt, Artificial Sequence
  SAMD9 targeting guide sequence portion
aaauauuucucaaagacagcaa

SEQ ID NO: 14583 - RNA, 22 nt, Artificial Sequence
  SAMD9 targeting guide sequence portion
aaauauuuucccagacauucua

SEQ ID NO: 14584 - RNA, 22 nt, Artificial Sequence
  SAMD9 targeting guide sequence portion
aaaugccauuugaguagacaau

SEQ ID NO: 14585 - RNA, 22 nt, Artificial Sequence
  SAMD9 targeting guide sequence portion
aaauggcauuuagacauuagaa

SEQ ID NO: 14586 - RNA, 22 nt, Artificial Sequence
  SAMD9 targeting guide sequence portion
aaauggguacugagaucaaauu

SEQ ID NO: 14587 - RNA, 22 nt, Artificial Sequence
  SAMD9 targeting guide sequence portion
aaauguugcuccucaguuugag

SEQ ID NO: 14588 - RNA, 22 nt, Artificial Sequence
  SAMD9 targeting guide sequence portion
aaauuaaauacugcauguacag

SEQ ID NO: 14589 - RNA, 22 nt, Artificial Sequence
  SAMD9 targeting guide sequence portion
aaauuaaauggguacugagauc

SEQ ID NO: 14590 - RNA, 22 nt, Artificial Sequence
  SAMD9 targeting guide sequence portion
aaauucuuggaggaagaauauc

SEQ ID NO: 14591 - RNA, 22 nt, Artificial Sequence
  SAMD9 targeting guide sequence portion
aacauauuugcuacuuuucaua

SEQ ID NO: 14592 - RNA, 22 nt, Artificial Sequence
  SAMD9 targeting guide sequence portion
aacaucauugaugacaaaauaa

SEQ ID NO: 14593 - RNA, 22 nt, Artificial Sequence
  SAMD9 targeting guide sequence portion
aacauguuaugaguucuacaaa

SEQ ID NO: 14594 - RNA, 22 nt, Artificial Sequence
  SAMD9 targeting guide sequence portion
aacauguuuaagaggaaauuaa

SEQ ID NO: 14595 - RNA, 22 nt, Artificial Sequence
  SAMD9 targeting guide sequence portion
aacauuuauucuuacuaagcag

SEQ ID NO: 14596 - RNA, 22 nt, Artificial Sequence
  SAMD9 targeting guide sequence portion
aaccaaaccaaggaacauauuu

SEQ ID NO: 14597 - RNA, 22 nt, Artificial Sequence
  SAMD9 targeting guide sequence portion
aaccaaggaacauauuugcuac

SEQ ID NO: 14598 - RNA, 22 nt, Artificial Sequence
  SAMD9 targeting guide sequence portion
aaccccacuacuuaccaggcau

SEQ ID NO: 14599 - RNA, 22 nt, Artificial Sequence
  SAMD9 targeting guide sequence portion
aaccggcaagguuauagauaca

SEQ ID NO: 14600 - RNA, 22 nt, Artificial Sequence
  SAMD9 targeting guide sequence portion
aaccucucaaacugaggagcaa

SEQ ID NO: 14601 - RNA, 22 nt, Artificial Sequence
  SAMD9 targeting guide sequence portion
aaccuugccgguuuaaagcaua

SEQ ID NO: 14602 - RNA, 22 nt, Artificial Sequence
  SAMD9 targeting guide sequence portion
aacucauaacauguuuaagagg

SEQ ID NO: 14603 - RNA, 22 nt, Artificial Sequence
  SAMD9 targeting guide sequence portion
aacugaggagcaacauuuauuc

SEQ ID NO: 14604 - RNA, 22 nt, Artificial Sequence
  SAMD9 targeting guide sequence portion
aacuucuccugacuccagucau

SEQ ID NO: 14605 - RNA, 22 nt, Artificial Sequence
  SAMD9 targeting guide sequence portion
aagaagauugucuacucaaaug

SEQ ID NO: 14606 - RNA, 22 nt, Artificial Sequence
  SAMD9 targeting guide sequence portion
aagaauaaauguugcuccucag

SEQ ID NO: 14607 - RNA, 22 nt, Artificial Sequence
  SAMD9 targeting guide sequence portion
aagaauuugaucucaguaccca

SEQ ID NO: 14608 - RNA, 22 nt, Artificial Sequence
  SAMD9 targeting guide sequence portion
aagacaauagugaaaaaggaag

SEQ ID NO: 14609 - RNA, 22 nt, Artificial Sequence
  SAMD9 targeting guide sequence portion
aagacagcaaaaaccucucaaa

SEQ ID NO: 14610 - RNA, 22 nt, Artificial Sequence
  SAMD9 targeting guide sequence portion
aagagcuagaggcuguaucuau

SEQ ID NO: 14611 - RNA, 22 nt, Artificial Sequence
  SAMD9 targeting guide sequence portion
aagaggaaauuaaauacugcau

SEQ ID NO: 14612 - RNA, 22 nt, Artificial Sequence
  SAMD9 targeting guide sequence portion
aagauccuugagugccaagcac

SEQ ID NO: 14613 - RNA, 22 nt, Artificial Sequence
  SAMD9 targeting guide sequence portion
aagaucuaugcuuuaaaccggc

SEQ ID NO: 14614 - RNA, 22 nt, Artificial Sequence
  SAMD9 targeting guide sequence portion
aagauugucuacucaaauggca

SEQ ID NO: 14615 - RNA, 22 nt, Artificial Sequence
  SAMD9 targeting guide sequence portion
aagcacaugauacauugaugau

SEQ ID NO: 14616 - RNA, 22 nt, Artificial Sequence
  SAMD9 targeting guide sequence portion
aagcagaucaucaauguaucau

SEQ ID NO: 14617 - RNA, 22 nt, Artificial Sequence
  SAMD9 targeting guide sequence portion
aagcuggcuacacagaacccca

SEQ ID NO: 14618 - RNA, 22 nt, Artificial Sequence
  SAMD9 targeting guide sequence portion
aaggaacauauuugcuacuuuu

SEQ ID NO: 14619 - RNA, 22 nt, Artificial Sequence
  SAMD9 targeting guide sequence portion
aaggaaggagugagauauauga

SEQ ID NO: 14620 - RNA, 22 nt, Artificial Sequence
  SAMD9 targeting guide sequence portion
aaggagcuaugacuggagucag

SEQ ID NO: 14621 - RNA, 22 nt, Artificial Sequence
  SAMD9 targeting guide sequence portion
aaggagugagauauaugaaaag

SEQ ID NO: 14622 - RNA, 22 nt, Artificial Sequence
  SAMD9 targeting guide sequence portion
aagguuauagauacagccucua

SEQ ID NO: 14623 - RNA, 22 nt, Artificial Sequence
  SAMD9 targeting guide sequence portion
aaguagcaaauauguuccuugg

SEQ ID NO: 14624 - RNA, 22 nt, Artificial Sequence
  SAMD9 targeting guide sequence portion
aaguagugggguucuguguagc

SEQ ID NO: 14625 - RNA, 22 nt, Artificial Sequence
  SAMD9 targeting guide sequence portion
aaguuaguguaauaagcuggcu

SEQ ID NO: 14626 - RNA, 22 nt, Artificial Sequence
  SAMD9 targeting guide sequence portion
aauaaauguugcuccucaguuu

SEQ ID NO: 14627 - RNA, 22 nt, Artificial Sequence
  SAMD9 targeting guide sequence portion
aauaagcuggcuacacagaacc

SEQ ID NO: 14628 - RNA, 22 nt, Artificial Sequence
  SAMD9 targeting guide sequence portion
aauaaggagcuaugacuggagu

SEQ ID NO: 14629 - RNA, 22 nt, Artificial Sequence
  SAMD9 targeting guide sequence portion
aauaauaaggagcuaugacugg

SEQ ID NO: 14630 - RNA, 22 nt, Artificial Sequence
  SAMD9 targeting guide sequence portion
aauacugcauguacagaucuga

SEQ ID NO: 14631 - RNA, 22 nt, Artificial Sequence
  SAMD9 targeting guide sequence portion
aauagugaaaaaggaaggagug

SEQ ID NO: 14632 - RNA, 22 nt, Artificial Sequence
  SAMD9 targeting guide sequence portion
aauauguuccuugguuugguua

SEQ ID NO: 14633 - RNA, 22 nt, Artificial Sequence
  SAMD9 targeting guide sequence portion
aauauuucucaaagacagcaaa

SEQ ID NO: 14634 - RNA, 22 nt, Artificial Sequence
  SAMD9 targeting guide sequence portion
aauauuuucccagacauucuaa

SEQ ID NO: 14635 - RNA, 22 nt, Artificial Sequence
  SAMD9 targeting guide sequence portion
aauccaugccugguaaguagug

SEQ ID NO: 14636 - RNA, 22 nt, Artificial Sequence
  SAMD9 targeting guide sequence portion
aaucuucuucaauccaugccug

SEQ ID NO: 14637 - RNA, 22 nt, Artificial Sequence
  SAMD9 targeting guide sequence portion
aaugauguuaaccaaaccaagg

SEQ ID NO: 14638 - RNA, 22 nt, Artificial Sequence
  SAMD9 targeting guide sequence portion
aaugccauuugaguagacaauc

SEQ ID NO: 14639 - RNA, 22 nt, Artificial Sequence
  SAMD9 targeting guide sequence portion
aauggcauuuagacauuagaau

SEQ ID NO: 14640 - RNA, 22 nt, Artificial Sequence
  SAMD9 targeting guide sequence portion
aauggguacugagaucaaauuc

SEQ ID NO: 14641 - RNA, 22 nt, Artificial Sequence
  SAMD9 targeting guide sequence portion
aauguaucaugugcuuggcacu

SEQ ID NO: 14642 - RNA, 22 nt, Artificial Sequence
  SAMD9 targeting guide sequence portion
aaugucuaaaugccauuugagu

SEQ ID NO: 14643 - RNA, 22 nt, Artificial Sequence
  SAMD9 targeting guide sequence portion
aaugucugggaaaauauuucuc

SEQ ID NO: 14644 - RNA, 22 nt, Artificial Sequence
  SAMD9 targeting guide sequence portion
aauguugcuccucaguuugaga

SEQ ID NO: 14645 - RNA, 22 nt, Artificial Sequence
  SAMD9 targeting guide sequence portion
aauuaaauacugcauguacaga

SEQ ID NO: 14646 - RNA, 22 nt, Artificial Sequence
  SAMD9 targeting guide sequence portion
aauuaaauggguacugagauca

SEQ ID NO: 14647 - RNA, 22 nt, Artificial Sequence
  SAMD9 targeting guide sequence portion
aauuuccucuuaaacauguuau

SEQ ID NO: 14648 - RNA, 22 nt, Artificial Sequence
  SAMD9 targeting guide sequence portion
aauuugaucucaguacccauuu

SEQ ID NO: 14649 - RNA, 22 nt, Artificial Sequence
  SAMD9 targeting guide sequence portion
acaaaauaauaaggagcuauga

SEQ ID NO: 14650 - RNA, 22 nt, Artificial Sequence
  SAMD9 targeting guide sequence portion
acaaagacaauagugaaaaagg

SEQ ID NO: 14651 - RNA, 22 nt, Artificial Sequence
  SAMD9 targeting guide sequence portion
acaauagugaaaaaggaaggag

SEQ ID NO: 14652 - RNA, 22 nt, Artificial Sequence
  SAMD9 targeting guide sequence portion
acaaucuucuucaauccaugcc

SEQ ID NO: 14653 - RNA, 22 nt, Artificial Sequence
  SAMD9 targeting guide sequence portion
acacagaaccccacuacuuacc

SEQ ID NO: 14654 - RNA, 22 nt, Artificial Sequence
  SAMD9 targeting guide sequence portion
acacuaacuucuccugacucca

SEQ ID NO: 14655 - RNA, 22 nt, Artificial Sequence
  SAMD9 targeting guide sequence portion
acagaaccccacuacuuaccag

SEQ ID NO: 14656 - RNA, 22 nt, Artificial Sequence
  SAMD9 targeting guide sequence portion
acagaucugaagagcuagaggc

SEQ ID NO: 14657 - RNA, 22 nt, Artificial Sequence
  SAMD9 targeting guide sequence portion
acagcaaaaaccucucaaacug

SEQ ID NO: 14658 - RNA, 22 nt, Artificial Sequence
  SAMD9 targeting guide sequence portion
acagccucuagcucuucagauc

SEQ ID NO: 14659 - RNA, 22 nt, Artificial Sequence
  SAMD9 targeting guide sequence portion
acauauuugcuacuuuucauau

SEQ ID NO: 14660 - RNA, 22 nt, Artificial Sequence
  SAMD9 targeting guide sequence portion
acaucauugaugacaaaauaau

SEQ ID NO: 14661 - RNA, 22 nt, Artificial Sequence
  SAMD9 targeting guide sequence portion
acaugauacauugaugaucugc

SEQ ID NO: 14662 - RNA, 22 nt, Artificial Sequence
  SAMD9 targeting guide sequence portion
acaugcaguauuuaauuuccuc

SEQ ID NO: 14663 - RNA, 22 nt, Artificial Sequence
  SAMD9 targeting guide sequence portion
acauguuaugaguucuacaaag

SEQ ID NO: 14664 - RNA, 22 nt, Artificial Sequence
  SAMD9 targeting guide sequence portion
acauguuuaagaggaaauuaaa

SEQ ID NO: 14665 - RNA, 22 nt, Artificial Sequence
  SAMD9 targeting guide sequence portion
acauuagaaugucugggaaaau

SEQ ID NO: 14666 - RNA, 22 nt, Artificial Sequence
  SAMD9 targeting guide sequence portion
acauucuaaugucuaaaugcca

SEQ ID NO: 14667 - RNA, 22 nt, Artificial Sequence
  SAMD9 targeting guide sequence portion
acauugaugaucugcuuaguaa

SEQ ID NO: 14668 - RNA, 22 nt, Artificial Sequence
  SAMD9 targeting guide sequence portion
acauuuauucuuacuaagcaga

SEQ ID NO: 14669 - RNA, 22 nt, Artificial Sequence
  SAMD9 targeting guide sequence portion
accaaaccaaggaacauauuug

SEQ ID NO: 14670 - RNA, 22 nt, Artificial Sequence
  SAMD9 targeting guide sequence portion
accaaggaacauauuugcuacu

SEQ ID NO: 14671 - RNA, 22 nt, Artificial Sequence
  SAMD9 targeting guide sequence portion
accaggcauggauugaagaaga

SEQ ID NO: 14672 - RNA, 22 nt, Artificial Sequence
  SAMD9 targeting guide sequence portion
accccacuacuuaccaggcaug

SEQ ID NO: 14673 - RNA, 22 nt, Artificial Sequence
  SAMD9 targeting guide sequence portion
accggcaagguuauagauacag

SEQ ID NO: 14674 - RNA, 22 nt, Artificial Sequence
  SAMD9 targeting guide sequence portion
accucucaaacugaggagcaac

SEQ ID NO: 14675 - RNA, 22 nt, Artificial Sequence
  SAMD9 targeting guide sequence portion
accuugccgguuuaaagcauag

SEQ ID NO: 14676 - RNA, 22 nt, Artificial Sequence
  SAMD9 targeting guide sequence portion
acuaacuucuccugacuccagu

SEQ ID NO: 14677 - RNA, 22 nt, Artificial Sequence
  SAMD9 targeting guide sequence portion
acuaagcagaucaucaauguau

SEQ ID NO: 14678 - RNA, 22 nt, Artificial Sequence
  SAMD9 targeting guide sequence portion
acuacuuaccaggcauggauug

SEQ ID NO: 14679 - RNA, 22 nt, Artificial Sequence
  SAMD9 targeting guide sequence portion
acuauugucuuuguagaacuca

SEQ ID NO: 14680 - RNA, 22 nt, Artificial Sequence
  SAMD9 targeting guide sequence portion
acucaaauggcauuuagacauu

SEQ ID NO: 14681 - RNA, 22 nt, Artificial Sequence
  SAMD9 targeting guide sequence portion
acucaagaucuaugcuuuaaac

SEQ ID NO: 14682 - RNA, 22 nt, Artificial Sequence
  SAMD9 targeting guide sequence portion
acucauaacauguuuaagagga

SEQ ID NO: 14683 - RNA, 22 nt, Artificial Sequence
  SAMD9 targeting guide sequence portion
acuccagucauagcuccuuauu

SEQ ID NO: 14684 - RNA, 22 nt, Artificial Sequence
  SAMD9 targeting guide sequence portion
acuccuuccuuuuucacuauug

SEQ ID NO: 14685 - RNA, 22 nt, Artificial Sequence
  SAMD9 targeting guide sequence portion
acugagaucaaauucuuggagg

SEQ ID NO: 14686 - RNA, 22 nt, Artificial Sequence
  SAMD9 targeting guide sequence portion
acugaggagcaacauuuauucu

SEQ ID NO: 14687 - RNA, 22 nt, Artificial Sequence
  SAMD9 targeting guide sequence portion
acugcauguacagaucugaaga

SEQ ID NO: 14688 - RNA, 22 nt, Artificial Sequence
  SAMD9 targeting guide sequence portion
acuggagucaggagaaguuagu

SEQ ID NO: 14689 - RNA, 22 nt, Artificial Sequence
  SAMD9 targeting guide sequence portion
acuuaccaggcauggauugaag

SEQ ID NO: 14690 - RNA, 22 nt, Artificial Sequence
  SAMD9 targeting guide sequence portion
acuucuccugacuccagucaua

SEQ ID NO: 14691 - RNA, 22 nt, Artificial Sequence
  SAMD9 targeting guide sequence portion
acuuuucauauaucucacuccu

SEQ ID NO: 14692 - RNA, 22 nt, Artificial Sequence
  SAMD9 targeting guide sequence portion
agaaauauuuucccagacauuc

SEQ ID NO: 14693 - RNA, 22 nt, Artificial Sequence
  SAMD9 targeting guide sequence portion
agaaccccacuacuuaccaggc

SEQ ID NO: 14694 - RNA, 22 nt, Artificial Sequence
  SAMD9 targeting guide sequence portion
agaacucauaacauguuuaaga

SEQ ID NO: 14695 - RNA, 22 nt, Artificial Sequence
  SAMD9 targeting guide sequence portion
agaagauugucuacucaaaugg

SEQ ID NO: 14696 - RNA, 22 nt, Artificial Sequence
  SAMD9 targeting guide sequence portion
agaaguuaguguaauaagcugg

SEQ ID NO: 14697 - RNA, 22 nt, Artificial Sequence
  SAMD9 targeting guide sequence portion
agaauaaauguugcuccucagu

SEQ ID NO: 14698 - RNA, 22 nt, Artificial Sequence
  SAMD9 targeting guide sequence portion
agaaugucugggaaaauauuuc

SEQ ID NO: 14699 - RNA, 22 nt, Artificial Sequence
  SAMD9 targeting guide sequence portion
agaauuugaucucaguacccau

SEQ ID NO: 14700 - RNA, 22 nt, Artificial Sequence
  SAMD9 targeting guide sequence portion
agacaauagugaaaaaggaagg

SEQ ID NO: 14701 - RNA, 22 nt, Artificial Sequence
  SAMD9 targeting guide sequence portion
agacaaucuucuucaauccaug

SEQ ID NO: 14702 - RNA, 22 nt, Artificial Sequence
  SAMD9 targeting guide sequence portion
agacagcaaaaaccucucaaac

SEQ ID NO: 14703 - RNA, 22 nt, Artificial Sequence
  SAMD9 targeting guide sequence portion
agacauuagaaugucugggaaa

SEQ ID NO: 14704 - RNA, 22 nt, Artificial Sequence
  SAMD9 targeting guide sequence portion
agacauucuaaugucuaaaugc

SEQ ID NO: 14705 - RNA, 22 nt, Artificial Sequence
  SAMD9 targeting guide sequence portion
agagcuagaggcuguaucuaua

SEQ ID NO: 14706 - RNA, 22 nt, Artificial Sequence
  SAMD9 targeting guide sequence portion
agaggaaauuaaauacugcaug

SEQ ID NO: 14707 - RNA, 22 nt, Artificial Sequence
  SAMD9 targeting guide sequence portion
agaggcuguaucuauaaccuug

SEQ ID NO: 14708 - RNA, 22 nt, Artificial Sequence
  SAMD9 targeting guide sequence portion
agagguuuuugcugucuuugag

SEQ ID NO: 14709 - RNA, 22 nt, Artificial Sequence
  SAMD9 targeting guide sequence portion
agauacagccucuagcucuuca

SEQ ID NO: 14710 - RNA, 22 nt, Artificial Sequence
  SAMD9 targeting guide sequence portion
agauauaugaaaaguagcaaau

SEQ ID NO: 14711 - RNA, 22 nt, Artificial Sequence
  SAMD9 targeting guide sequence portion
agaucaaauucuuggaggaaga

SEQ ID NO: 14712 - RNA, 22 nt, Artificial Sequence
  SAMD9 targeting guide sequence portion
agaucaucaauguaucaugugc

SEQ ID NO: 14713 - RNA, 22 nt, Artificial Sequence
  SAMD9 targeting guide sequence portion
agauccuugagugccaagcaca

SEQ ID NO: 14714 - RNA, 22 nt, Artificial Sequence
  SAMD9 targeting guide sequence portion
agaucuaugcuuuaaaccggca

SEQ ID NO: 14715 - RNA, 22 nt, Artificial Sequence
  SAMD9 targeting guide sequence portion
agaucugaagagcuagaggcug

SEQ ID NO: 14716 - RNA, 22 nt, Artificial Sequence
  SAMD9 targeting guide sequence portion
agaucuguacaugcaguauuua

SEQ ID NO: 14717 - RNA, 22 nt, Artificial Sequence
  SAMD9 targeting guide sequence portion
agauugucuacucaaauggcau

SEQ ID NO: 14718 - RNA, 22 nt, Artificial Sequence
  SAMD9 targeting guide sequence portion
agcaaaaaccucucaaacugag

SEQ ID NO: 14719 - RNA, 22 nt, Artificial Sequence
  SAMD9 targeting guide sequence portion
agcaaauauguuccuugguuug

SEQ ID NO: 14720 - RNA, 22 nt, Artificial Sequence
  SAMD9 targeting guide sequence portion
agcaacauuuauucuuacuaag

SEQ ID NO: 14721 - RNA, 22 nt, Artificial Sequence
  SAMD9 targeting guide sequence portion
agcacaugauacauugaugauc

SEQ ID NO: 14722 - RNA, 22 nt, Artificial Sequence
  SAMD9 targeting guide sequence portion
agcagaucaucaauguaucaug

SEQ ID NO: 14723 - RNA, 22 nt, Artificial Sequence
  SAMD9 targeting guide sequence portion
agccagcuuauuacacuaacuu

SEQ ID NO: 14724 - RNA, 22 nt, Artificial Sequence
  SAMD9 targeting guide sequence portion
agccucuagcucuucagaucug

SEQ ID NO: 14725 - RNA, 22 nt, Artificial Sequence
  SAMD9 targeting guide sequence portion
agccugauauucuuccuccaag

SEQ ID NO: 14726 - RNA, 22 nt, Artificial Sequence
  SAMD9 targeting guide sequence portion
agcuagaggcuguaucuauaac

SEQ ID NO: 14727 - RNA, 22 nt, Artificial Sequence
  SAMD9 targeting guide sequence portion
agcuaugacuggagucaggaga

SEQ ID NO: 14728 - RNA, 22 nt, Artificial Sequence
  SAMD9 targeting guide sequence portion
agcuccuuauuauuuugucauc

SEQ ID NO: 14729 - RNA, 22 nt, Artificial Sequence
  SAMD9 targeting guide sequence portion
agcucuucagaucuguacaugc

SEQ ID NO: 14730 - RNA, 22 nt, Artificial Sequence
  SAMD9 targeting guide sequence portion
agcuggcuacacagaaccccac

SEQ ID NO: 14731 - RNA, 22 nt, Artificial Sequence
  SAMD9 targeting guide sequence portion
agcuuauuacacuaacuucucc

SEQ ID NO: 14732 - RNA, 22 nt, Artificial Sequence
  SAMD9 targeting guide sequence portion
aggaaauuaaauacugcaugua

SEQ ID NO: 14733 - RNA, 22 nt, Artificial Sequence
  SAMD9 targeting guide sequence portion
aggaacauauuugcuacuuuuc

SEQ ID NO: 14734 - RNA, 22 nt, Artificial Sequence
  SAMD9 targeting guide sequence portion
aggaaggagugagauauaugaa

SEQ ID NO: 14735 - RNA, 22 nt, Artificial Sequence
  SAMD9 targeting guide sequence portion
aggagaaguuaguguaauaagc

SEQ ID NO: 14736 - RNA, 22 nt, Artificial Sequence
  SAMD9 targeting guide sequence portion
aggagcaacauuuauucuuacu

SEQ ID NO: 14737 - RNA, 22 nt, Artificial Sequence
  SAMD9 targeting guide sequence portion
aggagcuaugacuggagucagg

SEQ ID NO: 14738 - RNA, 22 nt, Artificial Sequence
  SAMD9 targeting guide sequence portion
aggagugagauauaugaaaagu

SEQ ID NO: 14739 - RNA, 22 nt, Artificial Sequence
  SAMD9 targeting guide sequence portion
aggcauggauugaagaagauug

SEQ ID NO: 14740 - RNA, 22 nt, Artificial Sequence
  SAMD9 targeting guide sequence portion
aggcuguaucuauaaccuugcc

SEQ ID NO: 14741 - RNA, 22 nt, Artificial Sequence
  SAMD9 targeting guide sequence portion
agguuauagauacagccucuag

SEQ ID NO: 14742 - RNA, 22 nt, Artificial Sequence
  SAMD9 targeting guide sequence portion
agguuuuugcugucuuugagaa

SEQ ID NO: 14743 - RNA, 22 nt, Artificial Sequence
  SAMD9 targeting guide sequence portion
aguaagaauaaauguugcuccu

SEQ ID NO: 14744 - RNA, 22 nt, Artificial Sequence
  SAMD9 targeting guide sequence portion
aguagacaaucuucuucaaucc

SEQ ID NO: 14745 - RNA, 22 nt, Artificial Sequence
  SAMD9 targeting guide sequence portion
aguagcaaauauguuccuuggu

SEQ ID NO: 14746 - RNA, 22 nt, Artificial Sequence
  SAMD9 targeting guide sequence portion
aguagugggguucuguguagcc

SEQ ID NO: 14747 - RNA, 22 nt, Artificial Sequence
  SAMD9 targeting guide sequence portion
aguauuuaauuuccucuuaaac

SEQ ID NO: 14748 - RNA, 22 nt, Artificial Sequence
  SAMD9 targeting guide sequence portion
agucaggagaaguuaguguaau

SEQ ID NO: 14749 - RNA, 22 nt, Artificial Sequence
  SAMD9 targeting guide sequence portion
agucauagcuccuuauuauuuu

SEQ ID NO: 14750 - RNA, 22 nt, Artificial Sequence
  SAMD9 targeting guide sequence portion
agugaaaaaggaaggagugaga

SEQ ID NO: 14751 - RNA, 22 nt, Artificial Sequence
  SAMD9 targeting guide sequence portion
agugagauauaugaaaaguagc

SEQ ID NO: 14752 - RNA, 22 nt, Artificial Sequence
  SAMD9 targeting guide sequence portion
agugccaagcacaugauacauu

SEQ ID NO: 14753 - RNA, 22 nt, Artificial Sequence
  SAMD9 targeting guide sequence portion
agugggguucuguguagccagc

SEQ ID NO: 14754 - RNA, 22 nt, Artificial Sequence
  SAMD9 targeting guide sequence portion
aguguaauaagcuggcuacaca

SEQ ID NO: 14755 - RNA, 22 nt, Artificial Sequence
  SAMD9 targeting guide sequence portion
aguuaguguaauaagcuggcua

SEQ ID NO: 14756 - RNA, 22 nt, Artificial Sequence
  SAMD9 targeting guide sequence portion
aguucuacaaagacaauaguga

SEQ ID NO: 14757 - RNA, 22 nt, Artificial Sequence
  SAMD9 targeting guide sequence portion
aguuugagagguuuuugcuguc

SEQ ID NO: 14758 - RNA, 22 nt, Artificial Sequence
  SAMD9 targeting guide sequence portion
auaaauguugcuccucaguuug

SEQ ID NO: 14759 - RNA, 22 nt, Artificial Sequence
  SAMD9 targeting guide sequence portion
auaacauguuuaagaggaaauu

SEQ ID NO: 14760 - RNA, 22 nt, Artificial Sequence
  SAMD9 targeting guide sequence portion
auaaccuugccgguuuaaagca

SEQ ID NO: 14761 - RNA, 22 nt, Artificial Sequence
  SAMD9 targeting guide sequence portion
auaagcuggcuacacagaaccc

SEQ ID NO: 14762 - RNA, 22 nt, Artificial Sequence
  SAMD9 targeting guide sequence portion
auaaggagcuaugacuggaguc

SEQ ID NO: 14763 - RNA, 22 nt, Artificial Sequence
  SAMD9 targeting guide sequence portion
auaauaaggagcuaugacugga

SEQ ID NO: 14764 - RNA, 22 nt, Artificial Sequence
  SAMD9 targeting guide sequence portion
auacagccucuagcucuucaga

SEQ ID NO: 14765 - RNA, 22 nt, Artificial Sequence
  SAMD9 targeting guide sequence portion
auacauugaugaucugcuuagu

SEQ ID NO: 14766 - RNA, 22 nt, Artificial Sequence
  SAMD9 targeting guide sequence portion
auacugcauguacagaucugaa

SEQ ID NO: 14767 - RNA, 22 nt, Artificial Sequence
  SAMD9 targeting guide sequence portion
auagauacagccucuagcucuu

SEQ ID NO: 14768 - RNA, 22 nt, Artificial Sequence
  SAMD9 targeting guide sequence portion
auagcuccuuauuauuuuguca

SEQ ID NO: 14769 - RNA, 22 nt, Artificial Sequence
  SAMD9 targeting guide sequence portion
auagugaaaaaggaaggaguga

SEQ ID NO: 14770 - RNA, 22 nt, Artificial Sequence
  SAMD9 targeting guide sequence portion
auauaucucacuccuuccuuuu

SEQ ID NO: 14771 - RNA, 22 nt, Artificial Sequence
  SAMD9 targeting guide sequence portion
auauaugaaaaguagcaaauau

SEQ ID NO: 14772 - RNA, 22 nt, Artificial Sequence
  SAMD9 targeting guide sequence portion
auaucucacuccuuccuuuuuc

SEQ ID NO: 14773 - RNA, 22 nt, Artificial Sequence
  SAMD9 targeting guide sequence portion
auaugaaaaguagcaaauaugu

SEQ ID NO: 14774 - RNA, 22 nt, Artificial Sequence
  SAMD9 targeting guide sequence portion
auauguuccuugguuugguuaa

SEQ ID NO: 14775 - RNA, 22 nt, Artificial Sequence
  SAMD9 targeting guide sequence portion
auauucuuccuccaagaauuug

SEQ ID NO: 14776 - RNA, 22 nt, Artificial Sequence
  SAMD9 targeting guide sequence portion
auauuucucaaagacagcaaaa

SEQ ID NO: 14777 - RNA, 22 nt, Artificial Sequence
  SAMD9 targeting guide sequence portion
auauuugcuacuuuucauauau

SEQ ID NO: 14778 - RNA, 22 nt, Artificial Sequence
  SAMD9 targeting guide sequence portion
auauuuucccagacauucuaau

SEQ ID NO: 14779 - RNA, 22 nt, Artificial Sequence
  SAMD9 targeting guide sequence portion
aucaaauucuuggaggaagaau

SEQ ID NO: 14780 - RNA, 22 nt, Artificial Sequence
  SAMD9 targeting guide sequence portion
aucaaugauguuaaccaaacca

SEQ ID NO: 14781 - RNA, 22 nt, Artificial Sequence
  SAMD9 targeting guide sequence portion
aucaauguaucaugugcuuggc

SEQ ID NO: 14782 - RNA, 22 nt, Artificial Sequence
  SAMD9 targeting guide sequence portion
aucaucaauguaucaugugcuu

SEQ ID NO: 14783 - RNA, 22 nt, Artificial Sequence
  SAMD9 targeting guide sequence portion
aucaugugcuuggcacucaagg

SEQ ID NO: 14784 - RNA, 22 nt, Artificial Sequence
  SAMD9 targeting guide sequence portion
aucauugaugacaaaauaauaa

SEQ ID NO: 14785 - RNA, 22 nt, Artificial Sequence
  SAMD9 targeting guide sequence portion
auccaugccugguaaguagugg

SEQ ID NO: 14786 - RNA, 22 nt, Artificial Sequence
  SAMD9 targeting guide sequence portion
auccuugagugccaagcacaug

SEQ ID NO: 14787 - RNA, 22 nt, Artificial Sequence
  SAMD9 targeting guide sequence portion
aucuauaaccuugccgguuuaa

SEQ ID NO: 14788 - RNA, 22 nt, Artificial Sequence
  SAMD9 targeting guide sequence portion
aucuaugcuuuaaaccggcaag

SEQ ID NO: 14789 - RNA, 22 nt, Artificial Sequence
  SAMD9 targeting guide sequence portion
aucucacuccuuccuuuuucac

SEQ ID NO: 14790 - RNA, 22 nt, Artificial Sequence
  SAMD9 targeting guide sequence portion
aucugaagagcuagaggcugua

SEQ ID NO: 14791 - RNA, 22 nt, Artificial Sequence
  SAMD9 targeting guide sequence portion
aucugcuuaguaagaauaaaug

SEQ ID NO: 14792 - RNA, 22 nt, Artificial Sequence
  SAMD9 targeting guide sequence portion
aucuguacaugcaguauuuaau

SEQ ID NO: 14793 - RNA, 22 nt, Artificial Sequence
  SAMD9 targeting guide sequence portion
aucuucuucaauccaugccugg

SEQ ID NO: 14794 - RNA, 22 nt, Artificial Sequence
  SAMD9 targeting guide sequence portion
augaaaaguagcaaauauguuc

SEQ ID NO: 14795 - RNA, 22 nt, Artificial Sequence
  SAMD9 targeting guide sequence portion
augacaaaauaauaaggagcua

SEQ ID NO: 14796 - RNA, 22 nt, Artificial Sequence
  SAMD9 targeting guide sequence portion
augacuggagucaggagaaguu

SEQ ID NO: 14797 - RNA, 22 nt, Artificial Sequence
  SAMD9 targeting guide sequence portion
augaguucuacaaagacaauag

SEQ ID NO: 14798 - RNA, 22 nt, Artificial Sequence
  SAMD9 targeting guide sequence portion
augauacauugaugaucugcuu

SEQ ID NO: 14799 - RNA, 22 nt, Artificial Sequence
  SAMD9 targeting guide sequence portion
augaucugcuuaguaagaauaa

SEQ ID NO: 14800 - RNA, 22 nt, Artificial Sequence
  SAMD9 targeting guide sequence portion
augauguuaaccaaaccaagga

SEQ ID NO: 14801 - RNA, 22 nt, Artificial Sequence
  SAMD9 targeting guide sequence portion
augcaguauuuaauuuccucuu

SEQ ID NO: 14802 - RNA, 22 nt, Artificial Sequence
  SAMD9 targeting guide sequence portion
augccauuugaguagacaaucu

SEQ ID NO: 14803 - RNA, 22 nt, Artificial Sequence
  SAMD9 targeting guide sequence portion
augccugguaaguagugggguu

SEQ ID NO: 14804 - RNA, 22 nt, Artificial Sequence
  SAMD9 targeting guide sequence portion
augcuuuaaaccggcaagguua

SEQ ID NO: 14805 - RNA, 22 nt, Artificial Sequence
  SAMD9 targeting guide sequence portion
auggauugaagaagauugucua

SEQ ID NO: 14806 - RNA, 22 nt, Artificial Sequence
  SAMD9 targeting guide sequence portion
auggcauuuagacauuagaaug

SEQ ID NO: 14807 - RNA, 22 nt, Artificial Sequence
  SAMD9 targeting guide sequence portion
auggguacugagaucaaauucu

SEQ ID NO: 14808 - RNA, 22 nt, Artificial Sequence
  SAMD9 targeting guide sequence portion
auguacagaucugaagagcuag

SEQ ID NO: 14809 - RNA, 22 nt, Artificial Sequence
  SAMD9 targeting guide sequence portion
auguaucaugugcuuggcacuc

SEQ ID NO: 14810 - RNA, 22 nt, Artificial Sequence
  SAMD9 targeting guide sequence portion
augucuaaaugccauuugagua

SEQ ID NO: 14811 - RNA, 22 nt, Artificial Sequence
  SAMD9 targeting guide sequence portion
augucugggaaaauauuucuca

SEQ ID NO: 14812 - RNA, 22 nt, Artificial Sequence
  SAMD9 targeting guide sequence portion
augugcuuggcacucaaggauc

SEQ ID NO: 14813 - RNA, 22 nt, Artificial Sequence
  SAMD9 targeting guide sequence portion
auguuaaccaaaccaaggaaca

SEQ ID NO: 14814 - RNA, 22 nt, Artificial Sequence
  SAMD9 targeting guide sequence portion
auguuaugaguucuacaaagac

SEQ ID NO: 14815 - RNA, 22 nt, Artificial Sequence
  SAMD9 targeting guide sequence portion
auguuccuugguuugguuaaca

SEQ ID NO: 14816 - RNA, 22 nt, Artificial Sequence
  SAMD9 targeting guide sequence portion
auguugcuccucaguuugagag

SEQ ID NO: 14817 - RNA, 22 nt, Artificial Sequence
  SAMD9 targeting guide sequence portion
auguuuaagaggaaauuaaaua

SEQ ID NO: 14818 - RNA, 22 nt, Artificial Sequence
  SAMD9 targeting guide sequence portion
auuaaauacugcauguacagau

SEQ ID NO: 14819 - RNA, 22 nt, Artificial Sequence
  SAMD9 targeting guide sequence portion
auuaaauggguacugagaucaa

SEQ ID NO: 14820 - RNA, 22 nt, Artificial Sequence
  SAMD9 targeting guide sequence portion
auuacacuaacuucuccugacu

SEQ ID NO: 14821 - RNA, 22 nt, Artificial Sequence
  SAMD9 targeting guide sequence portion
auuagaaugucugggaaaauau

SEQ ID NO: 14822 - RNA, 22 nt, Artificial Sequence
  SAMD9 targeting guide sequence portion
auuauuuugucaucaaugaugu

SEQ ID NO: 14823 - RNA, 22 nt, Artificial Sequence
  SAMD9 targeting guide sequence portion
auucuaaugucuaaaugccauu

SEQ ID NO: 14824 - RNA, 22 nt, Artificial Sequence
  SAMD9 targeting guide sequence portion
auucuuacuaagcagaucauca

SEQ ID NO: 14825 - RNA, 22 nt, Artificial Sequence
  SAMD9 targeting guide sequence portion
auucuuccuccaagaauuugau

SEQ ID NO: 14826 - RNA, 22 nt, Artificial Sequence
  SAMD9 targeting guide sequence portion
auugaagaagauugucuacuca

SEQ ID NO: 14827 - RNA, 22 nt, Artificial Sequence
  SAMD9 targeting guide sequence portion
auugaugacaaaauaauaagga

SEQ ID NO: 14828 - RNA, 22 nt, Artificial Sequence
  SAMD9 targeting guide sequence portion
auugaugaucugcuuaguaaga

SEQ ID NO: 14829 - RNA, 22 nt, Artificial Sequence
  SAMD9 targeting guide sequence portion
auugucuacucaaauggcauuu

SEQ ID NO: 14830 - RNA, 22 nt, Artificial Sequence
  SAMD9 targeting guide sequence portion
auugucuuuguagaacucauaa

SEQ ID NO: 14831 - RNA, 22 nt, Artificial Sequence
  SAMD9 targeting guide sequence portion
auuuaauuuccucuuaaacaug

SEQ ID NO: 14832 - RNA, 22 nt, Artificial Sequence
  SAMD9 targeting guide sequence portion
auuuagacauuagaaugucugg

SEQ ID NO: 14833 - RNA, 22 nt, Artificial Sequence
  SAMD9 targeting guide sequence portion
auuuauucuuacuaagcagauc

SEQ ID NO: 14834 - RNA, 22 nt, Artificial Sequence
  SAMD9 targeting guide sequence portion
auuuccucuuaaacauguuaug

SEQ ID NO: 14835 - RNA, 22 nt, Artificial Sequence
  SAMD9 targeting guide sequence portion
auuucucaaagacagcaaaaac

SEQ ID NO: 14836 - RNA, 22 nt, Artificial Sequence
  SAMD9 targeting guide sequence portion
auuugaguagacaaucuucuuc

SEQ ID NO: 14837 - RNA, 22 nt, Artificial Sequence
  SAMD9 targeting guide sequence portion
auuugaucucaguacccauuua

SEQ ID NO: 14838 - RNA, 22 nt, Artificial Sequence
  SAMD9 targeting guide sequence portion
auuugcuacuuuucauauaucu

SEQ ID NO: 14839 - RNA, 22 nt, Artificial Sequence
  SAMD9 targeting guide sequence portion
auuuucccagacauucuaaugu

SEQ ID NO: 14840 - RNA, 22 nt, Artificial Sequence
  SAMD9 targeting guide sequence portion
auuuugucaucaaugauguuaa

SEQ ID NO: 14841 - RNA, 22 nt, Artificial Sequence
  SAMD9 targeting guide sequence portion
caaaaaccucucaaacugagga

SEQ ID NO: 14842 - RNA, 22 nt, Artificial Sequence
  SAMD9 targeting guide sequence portion
caaaauaauaaggagcuaugac

SEQ ID NO: 14843 - RNA, 22 nt, Artificial Sequence
  SAMD9 targeting guide sequence portion
caaaccaaggaacauauuugcu

SEQ ID NO: 14844 - RNA, 22 nt, Artificial Sequence
  SAMD9 targeting guide sequence portion
caaacugaggagcaacauuuau

SEQ ID NO: 14845 - RNA, 22 nt, Artificial Sequence
  SAMD9 targeting guide sequence portion
caaagacaauagugaaaaagga

SEQ ID NO: 14846 - RNA, 22 nt, Artificial Sequence
  SAMD9 targeting guide sequence portion
caaagacagcaaaaaccucuca

SEQ ID NO: 14847 - RNA, 22 nt, Artificial Sequence
  SAMD9 targeting guide sequence portion
caaauauguuccuugguuuggu

SEQ ID NO: 14848 - RNA, 22 nt, Artificial Sequence
  SAMD9 targeting guide sequence portion
caaauggcauuuagacauuaga

SEQ ID NO: 14849 - RNA, 22 nt, Artificial Sequence
  SAMD9 targeting guide sequence portion
caaauucuuggaggaagaauau

SEQ ID NO: 14850 - RNA, 22 nt, Artificial Sequence
  SAMD9 targeting guide sequence portion
caacauuuauucuuacuaagca

SEQ ID NO: 14851 - RNA, 22 nt, Artificial Sequence
  SAMD9 targeting guide sequence portion
caagaauuugaucucaguaccc

SEQ ID NO: 14852 - RNA, 22 nt, Artificial Sequence
  SAMD9 targeting guide sequence portion
caagaucuaugcuuuaaaccgg

SEQ ID NO: 14853 - RNA, 22 nt, Artificial Sequence
  SAMD9 targeting guide sequence portion
caagcacaugauacauugauga

SEQ ID NO: 14854 - RNA, 22 nt, Artificial Sequence
  SAMD9 targeting guide sequence portion
caaggaacauauuugcuacuuu

SEQ ID NO: 14855 - RNA, 22 nt, Artificial Sequence
  SAMD9 targeting guide sequence portion
caagguuauagauacagccucu

SEQ ID NO: 14856 - RNA, 22 nt, Artificial Sequence
  SAMD9 targeting guide sequence portion
caauagugaaaaaggaaggagu

SEQ ID NO: 14857 - RNA, 22 nt, Artificial Sequence
  SAMD9 targeting guide sequence portion
caauccaugccugguaaguagu

SEQ ID NO: 14858 - RNA, 22 nt, Artificial Sequence
  SAMD9 targeting guide sequence portion
caaucuucuucaauccaugccu

SEQ ID NO: 14859 - RNA, 22 nt, Artificial Sequence
  SAMD9 targeting guide sequence portion
caaugauguuaaccaaaccaag

SEQ ID NO: 14860 - RNA, 22 nt, Artificial Sequence
  SAMD9 targeting guide sequence portion
caauguaucaugugcuuggcac

SEQ ID NO: 14861 - RNA, 22 nt, Artificial Sequence
  SAMD9 targeting guide sequence portion
cacagaaccccacuacuuacca

SEQ ID NO: 14862 - RNA, 22 nt, Artificial Sequence
  SAMD9 targeting guide sequence portion
cacaugauacauugaugaucug

SEQ ID NO: 14863 - RNA, 22 nt, Artificial Sequence
  SAMD9 targeting guide sequence portion
cacuaacuucuccugacuccag

SEQ ID NO: 14864 - RNA, 22 nt, Artificial Sequence
  SAMD9 targeting guide sequence portion
cacuacuuaccaggcauggauu

SEQ ID NO: 14865 - RNA, 22 nt, Artificial Sequence
  SAMD9 targeting guide sequence portion
cacuauugucuuuguagaacuc

SEQ ID NO: 14866 - RNA, 22 nt, Artificial Sequence
  SAMD9 targeting guide sequence portion
cacucaaggaucuuccaaaaca

SEQ ID NO: 14867 - RNA, 22 nt, Artificial Sequence
  SAMD9 targeting guide sequence portion
cacuccuuccuuuuucacuauu

SEQ ID NO: 14868 - RNA, 22 nt, Artificial Sequence
  SAMD9 targeting guide sequence portion
cagaaccccacuacuuaccagg

SEQ ID NO: 14869 - RNA, 22 nt, Artificial Sequence
  SAMD9 targeting guide sequence portion
cagacauucuaaugucuaaaug

SEQ ID NO: 14870 - RNA, 22 nt, Artificial Sequence
  SAMD9 targeting guide sequence portion
cagaucaucaauguaucaugug

SEQ ID NO: 14871 - RNA, 22 nt, Artificial Sequence
  SAMD9 targeting guide sequence portion
cagaucugaagagcuagaggcu

SEQ ID NO: 14872 - RNA, 22 nt, Artificial Sequence
  SAMD9 targeting guide sequence portion
cagaucuguacaugcaguauuu

SEQ ID NO: 14873 - RNA, 22 nt, Artificial Sequence
  SAMD9 targeting guide sequence portion
cagcaaaaaccucucaaacuga

SEQ ID NO: 14874 - RNA, 22 nt, Artificial Sequence
  SAMD9 targeting guide sequence portion
cagccucuagcucuucagaucu

SEQ ID NO: 14875 - RNA, 22 nt, Artificial Sequence
  SAMD9 targeting guide sequence portion
cagcuuauuacacuaacuucuc

SEQ ID NO: 14876 - RNA, 22 nt, Artificial Sequence
  SAMD9 targeting guide sequence portion
caggagaaguuaguguaauaag

SEQ ID NO: 14877 - RNA, 22 nt, Artificial Sequence
  SAMD9 targeting guide sequence portion
caggcauggauugaagaagauu

SEQ ID NO: 14878 - RNA, 22 nt, Artificial Sequence
  SAMD9 targeting guide sequence portion
caguauuuaauuuccucuuaaa

SEQ ID NO: 14879 - RNA, 22 nt, Artificial Sequence
  SAMD9 targeting guide sequence portion
cagucauagcuccuuauuauuu

SEQ ID NO: 14880 - RNA, 22 nt, Artificial Sequence
  SAMD9 targeting guide sequence portion
caguuugagagguuuuugcugu

SEQ ID NO: 14881 - RNA, 22 nt, Artificial Sequence
  SAMD9 targeting guide sequence portion
cauaacauguuuaagaggaaau

SEQ ID NO: 14882 - RNA, 22 nt, Artificial Sequence
  SAMD9 targeting guide sequence portion
cauagcuccuuauuauuuuguc

SEQ ID NO: 14883 - RNA, 22 nt, Artificial Sequence
  SAMD9 targeting guide sequence portion
cauauaucucacuccuuccuuu

SEQ ID NO: 14884 - RNA, 22 nt, Artificial Sequence
  SAMD9 targeting guide sequence portion
cauauuugcuacuuuucauaua

SEQ ID NO: 14885 - RNA, 22 nt, Artificial Sequence
  SAMD9 targeting guide sequence portion
caucaaugauguuaaccaaacc

SEQ ID NO: 14886 - RNA, 22 nt, Artificial Sequence
  SAMD9 targeting guide sequence portion
caucaauguaucaugugcuugg

SEQ ID NO: 14887 - RNA, 22 nt, Artificial Sequence
  SAMD9 targeting guide sequence portion
caucauugaugacaaaauaaua

SEQ ID NO: 14888 - RNA, 22 nt, Artificial Sequence
  SAMD9 targeting guide sequence portion
caugauacauugaugaucugcu

SEQ ID NO: 14889 - RNA, 22 nt, Artificial Sequence
  SAMD9 targeting guide sequence portion
caugcaguauuuaauuuccucu

SEQ ID NO: 14890 - RNA, 22 nt, Artificial Sequence
  SAMD9 targeting guide sequence portion
caugccugguaaguaguggggu

SEQ ID NO: 14891 - RNA, 22 nt, Artificial Sequence
  SAMD9 targeting guide sequence portion
cauggauugaagaagauugucu

SEQ ID NO: 14892 - RNA, 22 nt, Artificial Sequence
  SAMD9 targeting guide sequence portion
cauguacagaucugaagagcua

SEQ ID NO: 14893 - RNA, 22 nt, Artificial Sequence
  SAMD9 targeting guide sequence portion
caugugcuuggcacucaaggau

SEQ ID NO: 14894 - RNA, 22 nt, Artificial Sequence
  SAMD9 targeting guide sequence portion
cauguuaugaguucuacaaaga

SEQ ID NO: 14895 - RNA, 22 nt, Artificial Sequence
  SAMD9 targeting guide sequence portion
cauguuuaagaggaaauuaaau

SEQ ID NO: 14896 - RNA, 22 nt, Artificial Sequence
  SAMD9 targeting guide sequence portion
cauuagaaugucugggaaaaua

SEQ ID NO: 14897 - RNA, 22 nt, Artificial Sequence
  SAMD9 targeting guide sequence portion
cauucuaaugucuaaaugccau

SEQ ID NO: 14898 - RNA, 22 nt, Artificial Sequence
  SAMD9 targeting guide sequence portion
cauugaugacaaaauaauaagg

SEQ ID NO: 14899 - RNA, 22 nt, Artificial Sequence
  SAMD9 targeting guide sequence portion
cauugaugaucugcuuaguaag

SEQ ID NO: 14900 - RNA, 22 nt, Artificial Sequence
  SAMD9 targeting guide sequence portion
cauuuagacauuagaaugucug

SEQ ID NO: 14901 - RNA, 22 nt, Artificial Sequence
  SAMD9 targeting guide sequence portion
cauuuauucuuacuaagcagau

SEQ ID NO: 14902 - RNA, 22 nt, Artificial Sequence
  SAMD9 targeting guide sequence portion
cauuugaguagacaaucuucuu

SEQ ID NO: 14903 - RNA, 22 nt, Artificial Sequence
  SAMD9 targeting guide sequence portion
ccaaaccaaggaacauauuugc

SEQ ID NO: 14904 - RNA, 22 nt, Artificial Sequence
  SAMD9 targeting guide sequence portion
ccaagaauuugaucucaguacc

SEQ ID NO: 14905 - RNA, 22 nt, Artificial Sequence
  SAMD9 targeting guide sequence portion
ccaagcacaugauacauugaug

SEQ ID NO: 14906 - RNA, 22 nt, Artificial Sequence
  SAMD9 targeting guide sequence portion
ccaaggaacauauuugcuacuu

SEQ ID NO: 14907 - RNA, 22 nt, Artificial Sequence
  SAMD9 targeting guide sequence portion
ccacuacuuaccaggcauggau

SEQ ID NO: 14908 - RNA, 22 nt, Artificial Sequence
  SAMD9 targeting guide sequence portion
ccagacauucuaaugucuaaau

SEQ ID NO: 14909 - RNA, 22 nt, Artificial Sequence
  SAMD9 targeting guide sequence portion
ccagcuuauuacacuaacuucu

SEQ ID NO: 14910 - RNA, 22 nt, Artificial Sequence
  SAMD9 targeting guide sequence portion
ccaggcauggauugaagaagau

SEQ ID NO: 14911 - RNA, 22 nt, Artificial Sequence
  SAMD9 targeting guide sequence portion
ccagucauagcuccuuauuauu

SEQ ID NO: 14912 - RNA, 22 nt, Artificial Sequence
  SAMD9 targeting guide sequence portion
ccaugccugguaaguagugggg

SEQ ID NO: 14913 - RNA, 22 nt, Artificial Sequence
  SAMD9 targeting guide sequence portion
ccauuugaguagacaaucuucu

SEQ ID NO: 14914 - RNA, 22 nt, Artificial Sequence
  SAMD9 targeting guide sequence portion
cccacuacuuaccaggcaugga

SEQ ID NO: 14915 - RNA, 22 nt, Artificial Sequence
  SAMD9 targeting guide sequence portion
cccagacauucuaaugucuaaa

SEQ ID NO: 14916 - RNA, 22 nt, Artificial Sequence
  SAMD9 targeting guide sequence portion
ccccacuacuuaccaggcaugg

SEQ ID NO: 14917 - RNA, 22 nt, Artificial Sequence
  SAMD9 targeting guide sequence portion
ccggcaagguuauagauacagc

SEQ ID NO: 14918 - RNA, 22 nt, Artificial Sequence
  SAMD9 targeting guide sequence portion
ccgguuuaaagcauagaucuug

SEQ ID NO: 14919 - RNA, 22 nt, Artificial Sequence
  SAMD9 targeting guide sequence portion
ccucaguuugagagguuuuugc

SEQ ID NO: 14920 - RNA, 22 nt, Artificial Sequence
  SAMD9 targeting guide sequence portion
ccuccaagaauuugaucucagu

SEQ ID NO: 14921 - RNA, 22 nt, Artificial Sequence
  SAMD9 targeting guide sequence portion
ccucuagcucuucagaucugua

SEQ ID NO: 14922 - RNA, 22 nt, Artificial Sequence
  SAMD9 targeting guide sequence portion
ccucucaaacugaggagcaaca

SEQ ID NO: 14923 - RNA, 22 nt, Artificial Sequence
  SAMD9 targeting guide sequence portion
ccucuguuuuggaagauccuug

SEQ ID NO: 14924 - RNA, 22 nt, Artificial Sequence
  SAMD9 targeting guide sequence portion
ccucuuaaacauguuaugaguu

SEQ ID NO: 14925 - RNA, 22 nt, Artificial Sequence
  SAMD9 targeting guide sequence portion
ccugacuccagucauagcuccu

SEQ ID NO: 14926 - RNA, 22 nt, Artificial Sequence
  SAMD9 targeting guide sequence portion
ccugauauucuuccuccaagaa

SEQ ID NO: 14927 - RNA, 22 nt, Artificial Sequence
  SAMD9 targeting guide sequence portion
ccugguaaguagugggguucug

SEQ ID NO: 14928 - RNA, 22 nt, Artificial Sequence
  SAMD9 targeting guide sequence portion
ccuuauuauuuugucaucaaug

SEQ ID NO: 14929 - RNA, 22 nt, Artificial Sequence
  SAMD9 targeting guide sequence portion
ccuuccuuuuucacuauugucu

SEQ ID NO: 14930 - RNA, 22 nt, Artificial Sequence
  SAMD9 targeting guide sequence portion
ccuugagugccaagcacaugau

SEQ ID NO: 14931 - RNA, 22 nt, Artificial Sequence
  SAMD9 targeting guide sequence portion
ccuugccgguuuaaagcauaga

SEQ ID NO: 14932 - RNA, 22 nt, Artificial Sequence
  SAMD9 targeting guide sequence portion
ccuugguuugguuaacaucauu

SEQ ID NO: 14933 - RNA, 22 nt, Artificial Sequence
  SAMD9 targeting guide sequence portion
ccuuuuucacuauugucuuugu

SEQ ID NO: 14934 - RNA, 22 nt, Artificial Sequence
  SAMD9 targeting guide sequence portion
cggcaagguuauagauacagcc

SEQ ID NO: 14935 - RNA, 22 nt, Artificial Sequence
  SAMD9 targeting guide sequence portion
cgguuuaaagcauagaucuuga

SEQ ID NO: 14936 - RNA, 22 nt, Artificial Sequence
  SAMD9 targeting guide sequence portion
cuaaaugccauuugaguagaca

SEQ ID NO: 14937 - RNA, 22 nt, Artificial Sequence
  SAMD9 targeting guide sequence portion
cuaacuucuccugacuccaguc

SEQ ID NO: 14938 - RNA, 22 nt, Artificial Sequence
  SAMD9 targeting guide sequence portion
cuaagcagaucaucaauguauc

SEQ ID NO: 14939 - RNA, 22 nt, Artificial Sequence
  SAMD9 targeting guide sequence portion
cuaaugucuaaaugccauuuga

SEQ ID NO: 14940 - RNA, 22 nt, Artificial Sequence
  SAMD9 targeting guide sequence portion
cuacaaagacaauagugaaaaa

SEQ ID NO: 14941 - RNA, 22 nt, Artificial Sequence
  SAMD9 targeting guide sequence portion
cuacacagaaccccacuacuua

SEQ ID NO: 14942 - RNA, 22 nt, Artificial Sequence
  SAMD9 targeting guide sequence portion
cuacucaaauggcauuuagaca

SEQ ID NO: 14943 - RNA, 22 nt, Artificial Sequence
  SAMD9 targeting guide sequence portion
cuacuuaccaggcauggauuga

SEQ ID NO: 14944 - RNA, 22 nt, Artificial Sequence
  SAMD9 targeting guide sequence portion
cuacuuuucauauaucucacuc

SEQ ID NO: 14945 - RNA, 22 nt, Artificial Sequence
  SAMD9 targeting guide sequence portion
cuagaggcuguaucuauaaccu

SEQ ID NO: 14946 - RNA, 22 nt, Artificial Sequence
  SAMD9 targeting guide sequence portion
cuagcucuucagaucuguacau

SEQ ID NO: 14947 - RNA, 22 nt, Artificial Sequence
  SAMD9 targeting guide sequence portion
cuauaaccuugccgguuuaaag

SEQ ID NO: 14948 - RNA, 22 nt, Artificial Sequence
  SAMD9 targeting guide sequence portion
cuaugacuggagucaggagaag

SEQ ID NO: 14949 - RNA, 22 nt, Artificial Sequence
  SAMD9 targeting guide sequence portion
cuaugcuuuaaaccggcaaggu

SEQ ID NO: 14950 - RNA, 22 nt, Artificial Sequence
  SAMD9 targeting guide sequence portion
cuauugucuuuguagaacucau

SEQ ID NO: 14951 - RNA, 22 nt, Artificial Sequence
  SAMD9 targeting guide sequence portion
cucaaacugaggagcaacauuu

SEQ ID NO: 14952 - RNA, 22 nt, Artificial Sequence
  SAMD9 targeting guide sequence portion
cucaaagacagcaaaaaccucu

SEQ ID NO: 14953 - RNA, 22 nt, Artificial Sequence
  SAMD9 targeting guide sequence portion
cucaaauggcauuuagacauua

SEQ ID NO: 14954 - RNA, 22 nt, Artificial Sequence
  SAMD9 targeting guide sequence portion
cucaagaucuaugcuuuaaacc

SEQ ID NO: 14955 - RNA, 22 nt, Artificial Sequence
  SAMD9 targeting guide sequence portion
cucacuccuuccuuuuucacua

SEQ ID NO: 14956 - RNA, 22 nt, Artificial Sequence
  SAMD9 targeting guide sequence portion
cucaguuugagagguuuuugcu

SEQ ID NO: 14957 - RNA, 22 nt, Artificial Sequence
  SAMD9 targeting guide sequence portion
cucauaacauguuuaagaggaa

SEQ ID NO: 14958 - RNA, 22 nt, Artificial Sequence
  SAMD9 targeting guide sequence portion
cuccaagaauuugaucucagua

SEQ ID NO: 14959 - RNA, 22 nt, Artificial Sequence
  SAMD9 targeting guide sequence portion
cuccagucauagcuccuuauua

SEQ ID NO: 14960 - RNA, 22 nt, Artificial Sequence
  SAMD9 targeting guide sequence portion
cuccucaguuugagagguuuuu

SEQ ID NO: 14961 - RNA, 22 nt, Artificial Sequence
  SAMD9 targeting guide sequence portion
cuccugacuccagucauagcuc

SEQ ID NO: 14962 - RNA, 22 nt, Artificial Sequence
  SAMD9 targeting guide sequence portion
cuccuuauuauuuugucaucaa

SEQ ID NO: 14963 - RNA, 22 nt, Artificial Sequence
  SAMD9 targeting guide sequence portion
cuccuuccuuuuucacuauugu

SEQ ID NO: 14964 - RNA, 22 nt, Artificial Sequence
  SAMD9 targeting guide sequence portion
cucuagcucuucagaucuguac

SEQ ID NO: 14965 - RNA, 22 nt, Artificial Sequence
  SAMD9 targeting guide sequence portion
cucucaaacugaggagcaacau

SEQ ID NO: 14966 - RNA, 22 nt, Artificial Sequence
  SAMD9 targeting guide sequence portion
cucuguuuuggaagauccuuga

SEQ ID NO: 14967 - RNA, 22 nt, Artificial Sequence
  SAMD9 targeting guide sequence portion
cucuuaaacauguuaugaguuc

SEQ ID NO: 14968 - RNA, 22 nt, Artificial Sequence
  SAMD9 targeting guide sequence portion
cucuucagaucuguacaugcag

SEQ ID NO: 14969 - RNA, 22 nt, Artificial Sequence
  SAMD9 targeting guide sequence portion
cugaagagcuagaggcuguauc

SEQ ID NO: 14970 - RNA, 22 nt, Artificial Sequence
  SAMD9 targeting guide sequence portion
cugacuccagucauagcuccuu

SEQ ID NO: 14971 - RNA, 22 nt, Artificial Sequence
  SAMD9 targeting guide sequence portion
cugagaucaaauucuuggagga

SEQ ID NO: 14972 - RNA, 22 nt, Artificial Sequence
  SAMD9 targeting guide sequence portion
cugaggagcaacauuuauucuu

SEQ ID NO: 14973 - RNA, 22 nt, Artificial Sequence
  SAMD9 targeting guide sequence portion
cugauauucuuccuccaagaau

SEQ ID NO: 14974 - RNA, 22 nt, Artificial Sequence
  SAMD9 targeting guide sequence portion
cugcauguacagaucugaagag

SEQ ID NO: 14975 - RNA, 22 nt, Artificial Sequence
  SAMD9 targeting guide sequence portion
cugcuuaguaagaauaaauguu

SEQ ID NO: 14976 - RNA, 22 nt, Artificial Sequence
  SAMD9 targeting guide sequence portion
cuggagucaggagaaguuagug

SEQ ID NO: 14977 - RNA, 22 nt, Artificial Sequence
  SAMD9 targeting guide sequence portion
cuggcuacacagaaccccacua

SEQ ID NO: 14978 - RNA, 22 nt, Artificial Sequence
  SAMD9 targeting guide sequence portion
cugggaaaauauuucucaaaga

SEQ ID NO: 14979 - RNA, 22 nt, Artificial Sequence
  SAMD9 targeting guide sequence portion
cugguaaguagugggguucugu

SEQ ID NO: 14980 - RNA, 22 nt, Artificial Sequence
  SAMD9 targeting guide sequence portion
cuguacaugcaguauuuaauuu

SEQ ID NO: 14981 - RNA, 22 nt, Artificial Sequence
  SAMD9 targeting guide sequence portion
cuguaucuauaaccuugccggu

SEQ ID NO: 14982 - RNA, 22 nt, Artificial Sequence
  SAMD9 targeting guide sequence portion
cugucuuugagaaauauuuucc

SEQ ID NO: 14983 - RNA, 22 nt, Artificial Sequence
  SAMD9 targeting guide sequence portion
cuguguagccagcuuauuacac

SEQ ID NO: 14984 - RNA, 22 nt, Artificial Sequence
  SAMD9 targeting guide sequence portion
cuguuuuggaagauccuugagu

SEQ ID NO: 14985 - RNA, 22 nt, Artificial Sequence
  SAMD9 targeting guide sequence portion
cuuaaacauguuaugaguucua

SEQ ID NO: 14986 - RNA, 22 nt, Artificial Sequence
  SAMD9 targeting guide sequence portion
cuuaccaggcauggauugaaga

SEQ ID NO: 14987 - RNA, 22 nt, Artificial Sequence
  SAMD9 targeting guide sequence portion
cuuacuaagcagaucaucaaug

SEQ ID NO: 14988 - RNA, 22 nt, Artificial Sequence
  SAMD9 targeting guide sequence portion
cuuaguaagaauaaauguugcu

SEQ ID NO: 14989 - RNA, 22 nt, Artificial Sequence
  SAMD9 targeting guide sequence portion
cuuauuacacuaacuucuccug

SEQ ID NO: 14990 - RNA, 22 nt, Artificial Sequence
  SAMD9 targeting guide sequence portion
cuuauuauuuugucaucaauga

SEQ ID NO: 14991 - RNA, 22 nt, Artificial Sequence
  SAMD9 targeting guide sequence portion
cuucaauccaugccugguaagu

SEQ ID NO: 14992 - RNA, 22 nt, Artificial Sequence
  SAMD9 targeting guide sequence portion
cuucagaucuguacaugcagua

SEQ ID NO: 14993 - RNA, 22 nt, Artificial Sequence
  SAMD9 targeting guide sequence portion
cuuccuccaagaauuugaucuc

SEQ ID NO: 14994 - RNA, 22 nt, Artificial Sequence
  SAMD9 targeting guide sequence portion
cuuccuuuuucacuauugucuu

SEQ ID NO: 14995 - RNA, 22 nt, Artificial Sequence
  SAMD9 targeting guide sequence portion
cuucuccugacuccagucauag

SEQ ID NO: 14996 - RNA, 22 nt, Artificial Sequence
  SAMD9 targeting guide sequence portion
cuucuucaauccaugccuggua

SEQ ID NO: 14997 - RNA, 22 nt, Artificial Sequence
  SAMD9 targeting guide sequence portion
cuugagugccaagcacaugaua

SEQ ID NO: 14998 - RNA, 22 nt, Artificial Sequence
  SAMD9 targeting guide sequence portion
cuugccgguuuaaagcauagau

SEQ ID NO: 14999 - RNA, 22 nt, Artificial Sequence
  SAMD9 targeting guide sequence portion
cuuggcacucaaggaucuucca

SEQ ID NO: 15000 - RNA, 22 nt, Artificial Sequence
  SAMD9 targeting guide sequence portion
cuugguuugguuaacaucauug

SEQ ID NO: 15001 - RNA, 22 nt, Artificial Sequence
  SAMD9 targeting guide sequence portion
cuuuaaaccggcaagguuauag

SEQ ID NO: 15002 - RNA, 22 nt, Artificial Sequence
  SAMD9 targeting guide sequence portion
cuuugagaaauauuuucccaga

SEQ ID NO: 15003 - RNA, 22 nt, Artificial Sequence
  SAMD9 targeting guide sequence portion
cuuuguagaacucauaacaugu

SEQ ID NO: 15004 - RNA, 22 nt, Artificial Sequence
  SAMD9 targeting guide sequence portion
cuuuucauauaucucacuccuu

SEQ ID NO: 15005 - RNA, 22 nt, Artificial Sequence
  SAMD9 targeting guide sequence portion
cuuuuucacuauugucuuugua

SEQ ID NO: 15006 - RNA, 22 nt, Artificial Sequence
  SAMD9 targeting guide sequence portion
gaaaaaggaaggagugagauau

SEQ ID NO: 15007 - RNA, 22 nt, Artificial Sequence
  SAMD9 targeting guide sequence portion
gaaaaguagcaaauauguuccu

SEQ ID NO: 15008 - RNA, 22 nt, Artificial Sequence
  SAMD9 targeting guide sequence portion
gaaaauauuucucaaagacagc

SEQ ID NO: 15009 - RNA, 22 nt, Artificial Sequence
  SAMD9 targeting guide sequence portion
gaaauauuuucccagacauucu

SEQ ID NO: 15010 - RNA, 22 nt, Artificial Sequence
  SAMD9 targeting guide sequence portion
gaaauuaaauacugcauguaca

SEQ ID NO: 15011 - RNA, 22 nt, Artificial Sequence
  SAMD9 targeting guide sequence portion
gaacauauuugcuacuuuucau

SEQ ID NO: 15012 - RNA, 22 nt, Artificial Sequence
  SAMD9 targeting guide sequence portion
gaaccccacuacuuaccaggca

SEQ ID NO: 15013 - RNA, 22 nt, Artificial Sequence
  SAMD9 targeting guide sequence portion
gaacucauaacauguuuaagag

SEQ ID NO: 15014 - RNA, 22 nt, Artificial Sequence
  SAMD9 targeting guide sequence portion
gaagaagauugucuacucaaau

SEQ ID NO: 15015 - RNA, 22 nt, Artificial Sequence
  SAMD9 targeting guide sequence portion
gaagagcuagaggcuguaucua

SEQ ID NO: 15016 - RNA, 22 nt, Artificial Sequence
  SAMD9 targeting guide sequence portion
gaagauccuugagugccaagca

SEQ ID NO: 15017 - RNA, 22 nt, Artificial Sequence
  SAMD9 targeting guide sequence portion
gaagauugucuacucaaauggc

SEQ ID NO: 15018 - RNA, 22 nt, Artificial Sequence
  SAMD9 targeting guide sequence portion
gaaggagugagauauaugaaaa

SEQ ID NO: 15019 - RNA, 22 nt, Artificial Sequence
  SAMD9 targeting guide sequence portion
gaaguuaguguaauaagcuggc

SEQ ID NO: 15020 - RNA, 22 nt, Artificial Sequence
  SAMD9 targeting guide sequence portion
gaauaaauguugcuccucaguu

SEQ ID NO: 15021 - RNA, 22 nt, Artificial Sequence
  SAMD9 targeting guide sequence portion
gaaugucugggaaaauauuucu

SEQ ID NO: 15022 - RNA, 22 nt, Artificial Sequence
  SAMD9 targeting guide sequence portion
gaauuugaucucaguacccauu

SEQ ID NO: 15023 - RNA, 22 nt, Artificial Sequence
  SAMD9 targeting guide sequence portion
gacaaaauaauaaggagcuaug

SEQ ID NO: 15024 - RNA, 22 nt, Artificial Sequence
  SAMD9 targeting guide sequence portion
gacaauagugaaaaaggaagga

SEQ ID NO: 15025 - RNA, 22 nt, Artificial Sequence
  SAMD9 targeting guide sequence portion
gacaaucuucuucaauccaugc

SEQ ID NO: 15026 - RNA, 22 nt, Artificial Sequence
  SAMD9 targeting guide sequence portion
gacagcaaaaaccucucaaacu

SEQ ID NO: 15027 - RNA, 22 nt, Artificial Sequence
  SAMD9 targeting guide sequence portion
gacauuagaaugucugggaaaa

SEQ ID NO: 15028 - RNA, 22 nt, Artificial Sequence
  SAMD9 targeting guide sequence portion
gacauucuaaugucuaaaugcc

SEQ ID NO: 15029 - RNA, 22 nt, Artificial Sequence
  SAMD9 targeting guide sequence portion
gacucaagaucuaugcuuuaaa

SEQ ID NO: 15030 - RNA, 22 nt, Artificial Sequence
  SAMD9 targeting guide sequence portion
gacuccagucauagcuccuuau

SEQ ID NO: 15031 - RNA, 22 nt, Artificial Sequence
  SAMD9 targeting guide sequence portion
gacuggagucaggagaaguuag

SEQ ID NO: 15032 - RNA, 22 nt, Artificial Sequence
  SAMD9 targeting guide sequence portion
gagaaauauuuucccagacauu

SEQ ID NO: 15033 - RNA, 22 nt, Artificial Sequence
  SAMD9 targeting guide sequence portion
gagaaguuaguguaauaagcug

SEQ ID NO: 15034 - RNA, 22 nt, Artificial Sequence
  SAMD9 targeting guide sequence portion
gagagguuuuugcugucuuuga

SEQ ID NO: 15035 - RNA, 22 nt, Artificial Sequence
  SAMD9 targeting guide sequence portion
gagauauaugaaaaguagcaaa

SEQ ID NO: 15036 - RNA, 22 nt, Artificial Sequence
  SAMD9 targeting guide sequence portion
gagaucaaauucuuggaggaag

SEQ ID NO: 15037 - RNA, 22 nt, Artificial Sequence
  SAMD9 targeting guide sequence portion
gagcaacauuuauucuuacuaa

SEQ ID NO: 15038 - RNA, 22 nt, Artificial Sequence
  SAMD9 targeting guide sequence portion
gagccugauauucuuccuccaa

SEQ ID NO: 15039 - RNA, 22 nt, Artificial Sequence
  SAMD9 targeting guide sequence portion
gagcuagaggcuguaucuauaa

SEQ ID NO: 15040 - RNA, 22 nt, Artificial Sequence
  SAMD9 targeting guide sequence portion
gagcuaugacuggagucaggag

SEQ ID NO: 15041 - RNA, 22 nt, Artificial Sequence
  SAMD9 targeting guide sequence portion
gaggaaauuaaauacugcaugu

SEQ ID NO: 15042 - RNA, 22 nt, Artificial Sequence
  SAMD9 targeting guide sequence portion
gaggagcaacauuuauucuuac

SEQ ID NO: 15043 - RNA, 22 nt, Artificial Sequence
  SAMD9 targeting guide sequence portion
gaggcuguaucuauaaccuugc

SEQ ID NO: 15044 - RNA, 22 nt, Artificial Sequence
  SAMD9 targeting guide sequence portion
gagguuuuugcugucuuugaga

SEQ ID NO: 15045 - RNA, 22 nt, Artificial Sequence
  SAMD9 targeting guide sequence portion
gaguagacaaucuucuucaauc

SEQ ID NO: 15046 - RNA, 22 nt, Artificial Sequence
  SAMD9 targeting guide sequence portion
gagucaggagaaguuaguguaa

SEQ ID NO: 15047 - RNA, 22 nt, Artificial Sequence
  SAMD9 targeting guide sequence portion
gagugagauauaugaaaaguag

SEQ ID NO: 15048 - RNA, 22 nt, Artificial Sequence
  SAMD9 targeting guide sequence portion
gagugccaagcacaugauacau

SEQ ID NO: 15049 - RNA, 22 nt, Artificial Sequence
  SAMD9 targeting guide sequence portion
gaguucuacaaagacaauagug

SEQ ID NO: 15050 - RNA, 22 nt, Artificial Sequence
  SAMD9 targeting guide sequence portion
gauacagccucuagcucuucag

SEQ ID NO: 15051 - RNA, 22 nt, Artificial Sequence
  SAMD9 targeting guide sequence portion
gauacauugaugaucugcuuag

SEQ ID NO: 15052 - RNA, 22 nt, Artificial Sequence
  SAMD9 targeting guide sequence portion
gauauaugaaaaguagcaaaua

SEQ ID NO: 15053 - RNA, 22 nt, Artificial Sequence
  SAMD9 targeting guide sequence portion
gauauucuuccuccaagaauuu

SEQ ID NO: 15054 - RNA, 22 nt, Artificial Sequence
  SAMD9 targeting guide sequence portion
gaucaaauucuuggaggaagaa

SEQ ID NO: 15055 - RNA, 22 nt, Artificial Sequence
  SAMD9 targeting guide sequence portion
gaucaucaauguaucaugugcu

SEQ ID NO: 15056 - RNA, 22 nt, Artificial Sequence
  SAMD9 targeting guide sequence portion
gauccuugagugccaagcacau

SEQ ID NO: 15057 - RNA, 22 nt, Artificial Sequence
  SAMD9 targeting guide sequence portion
gaucuaugcuuuaaaccggcaa

SEQ ID NO: 15058 - RNA, 22 nt, Artificial Sequence
  SAMD9 targeting guide sequence portion
gaucugaagagcuagaggcugu

SEQ ID NO: 15059 - RNA, 22 nt, Artificial Sequence
  SAMD9 targeting guide sequence portion
gaucugcuuaguaagaauaaau

SEQ ID NO: 15060 - RNA, 22 nt, Artificial Sequence
  SAMD9 targeting guide sequence portion
gaucuguacaugcaguauuuaa

SEQ ID NO: 15061 - RNA, 22 nt, Artificial Sequence
  SAMD9 targeting guide sequence portion
gaugacaaaauaauaaggagcu

SEQ ID NO: 15062 - RNA, 22 nt, Artificial Sequence
  SAMD9 targeting guide sequence portion
gaugaucugcuuaguaagaaua

SEQ ID NO: 15063 - RNA, 22 nt, Artificial Sequence
  SAMD9 targeting guide sequence portion
gauguuaaccaaaccaaggaac

SEQ ID NO: 15064 - RNA, 22 nt, Artificial Sequence
  SAMD9 targeting guide sequence portion
gauugaagaagauugucuacuc

SEQ ID NO: 15065 - RNA, 22 nt, Artificial Sequence
  SAMD9 targeting guide sequence portion
gauugucuacucaaauggcauu

SEQ ID NO: 15066 - RNA, 22 nt, Artificial Sequence
  SAMD9 targeting guide sequence portion
gcaaaaaccucucaaacugagg

SEQ ID NO: 15067 - RNA, 22 nt, Artificial Sequence
  SAMD9 targeting guide sequence portion
gcaaauauguuccuugguuugg

SEQ ID NO: 15068 - RNA, 22 nt, Artificial Sequence
  SAMD9 targeting guide sequence portion
gcaacauuuauucuuacuaagc

SEQ ID NO: 15069 - RNA, 22 nt, Artificial Sequence
  SAMD9 targeting guide sequence portion
gcaagguuauagauacagccuc

SEQ ID NO: 15070 - RNA, 22 nt, Artificial Sequence
  SAMD9 targeting guide sequence portion
gcacaugauacauugaugaucu

SEQ ID NO: 15071 - RNA, 22 nt, Artificial Sequence
  SAMD9 targeting guide sequence portion
gcacucaaggaucuuccaaaac

SEQ ID NO: 15072 - RNA, 22 nt, Artificial Sequence
  SAMD9 targeting guide sequence portion
gcagaucaucaauguaucaugu

SEQ ID NO: 15073 - RNA, 22 nt, Artificial Sequence
  SAMD9 targeting guide sequence portion
gcaguauuuaauuuccucuuaa

SEQ ID NO: 15074 - RNA, 22 nt, Artificial Sequence
  SAMD9 targeting guide sequence portion
gcauggauugaagaagauuguc

SEQ ID NO: 15075 - RNA, 22 nt, Artificial Sequence
  SAMD9 targeting guide sequence portion
gcauguacagaucugaagagcu

SEQ ID NO: 15076 - RNA, 22 nt, Artificial Sequence
  SAMD9 targeting guide sequence portion
gcauuuagacauuagaaugucu

SEQ ID NO: 15077 - RNA, 22 nt, Artificial Sequence
  SAMD9 targeting guide sequence portion
gccaagcacaugauacauugau

SEQ ID NO: 15078 - RNA, 22 nt, Artificial Sequence
  SAMD9 targeting guide sequence portion
gccagcuuauuacacuaacuuc

SEQ ID NO: 15079 - RNA, 22 nt, Artificial Sequence
  SAMD9 targeting guide sequence portion
gccauuugaguagacaaucuuc

SEQ ID NO: 15080 - RNA, 22 nt, Artificial Sequence
  SAMD9 targeting guide sequence portion
gccgguuuaaagcauagaucuu

SEQ ID NO: 15081 - RNA, 22 nt, Artificial Sequence
  SAMD9 targeting guide sequence portion
gccucuagcucuucagaucugu

SEQ ID NO: 15082 - RNA, 22 nt, Artificial Sequence
  SAMD9 targeting guide sequence portion
gccugauauucuuccuccaaga

SEQ ID NO: 15083 - RNA, 22 nt, Artificial Sequence
  SAMD9 targeting guide sequence portion
gccugguaaguagugggguucu

SEQ ID NO: 15084 - RNA, 22 nt, Artificial Sequence
  SAMD9 targeting guide sequence portion
gcuacacagaaccccacuacuu

SEQ ID NO: 15085 - RNA, 22 nt, Artificial Sequence
  SAMD9 targeting guide sequence portion
gcuacuuuucauauaucucacu

SEQ ID NO: 15086 - RNA, 22 nt, Artificial Sequence
  SAMD9 targeting guide sequence portion
gcuagaggcuguaucuauaacc

SEQ ID NO: 15087 - RNA, 22 nt, Artificial Sequence
  SAMD9 targeting guide sequence portion
gcuaugacuggagucaggagaa

SEQ ID NO: 15088 - RNA, 22 nt, Artificial Sequence
  SAMD9 targeting guide sequence portion
gcuccucaguuugagagguuuu

SEQ ID NO: 15089 - RNA, 22 nt, Artificial Sequence
  SAMD9 targeting guide sequence portion
gcuccuuauuauuuugucauca

SEQ ID NO: 15090 - RNA, 22 nt, Artificial Sequence
  SAMD9 targeting guide sequence portion
gcucuucagaucuguacaugca

SEQ ID NO: 15091 - RNA, 22 nt, Artificial Sequence
  SAMD9 targeting guide sequence portion
gcuggcuacacagaaccccacu

SEQ ID NO: 15092 - RNA, 22 nt, Artificial Sequence
  SAMD9 targeting guide sequence portion
gcuguaucuauaaccuugccgg

SEQ ID NO: 15093 - RNA, 22 nt, Artificial Sequence
  SAMD9 targeting guide sequence portion
gcugucuuugagaaauauuuuc

SEQ ID NO: 15094 - RNA, 22 nt, Artificial Sequence
  SAMD9 targeting guide sequence portion
gcuuaguaagaauaaauguugc

SEQ ID NO: 15095 - RNA, 22 nt, Artificial Sequence
  SAMD9 targeting guide sequence portion
gcuuauuacacuaacuucuccu

SEQ ID NO: 15096 - RNA, 22 nt, Artificial Sequence
  SAMD9 targeting guide sequence portion
gcuuggcacucaaggaucuucc

SEQ ID NO: 15097 - RNA, 22 nt, Artificial Sequence
  SAMD9 targeting guide sequence portion
gcuuuaaaccggcaagguuaua

SEQ ID NO: 15098 - RNA, 22 nt, Artificial Sequence
  SAMD9 targeting guide sequence portion
ggaaaauauuucucaaagacag

SEQ ID NO: 15099 - RNA, 22 nt, Artificial Sequence
  SAMD9 targeting guide sequence portion
ggaaauuaaauacugcauguac

SEQ ID NO: 15100 - RNA, 22 nt, Artificial Sequence
  SAMD9 targeting guide sequence portion
ggaacauauuugcuacuuuuca

SEQ ID NO: 15101 - RNA, 22 nt, Artificial Sequence
  SAMD9 targeting guide sequence portion
ggaagauccuugagugccaagc

SEQ ID NO: 15102 - RNA, 22 nt, Artificial Sequence
  SAMD9 targeting guide sequence portion
ggaaggagugagauauaugaaa

SEQ ID NO: 15103 - RNA, 22 nt, Artificial Sequence
  SAMD9 targeting guide sequence portion
ggacucaagaucuaugcuuuaa

SEQ ID NO: 15104 - RNA, 22 nt, Artificial Sequence
  SAMD9 targeting guide sequence portion
ggagaaguuaguguaauaagcu

SEQ ID NO: 15105 - RNA, 22 nt, Artificial Sequence
  SAMD9 targeting guide sequence portion
ggagcaacauuuauucuuacua

SEQ ID NO: 15106 - RNA, 22 nt, Artificial Sequence
  SAMD9 targeting guide sequence portion
ggagcuaugacuggagucagga

SEQ ID NO: 15107 - RNA, 22 nt, Artificial Sequence
  SAMD9 targeting guide sequence portion
ggagucaggagaaguuagugua

SEQ ID NO: 15108 - RNA, 22 nt, Artificial Sequence
  SAMD9 targeting guide sequence portion
ggagugagauauaugaaaagua

SEQ ID NO: 15109 - RNA, 22 nt, Artificial Sequence
  SAMD9 targeting guide sequence portion
ggauugaagaagauugucuacu

SEQ ID NO: 15110 - RNA, 22 nt, Artificial Sequence
  SAMD9 targeting guide sequence portion
ggcaagguuauagauacagccu

SEQ ID NO: 15111 - RNA, 22 nt, Artificial Sequence
  SAMD9 targeting guide sequence portion
ggcacucaaggaucuuccaaaa

SEQ ID NO: 15112 - RNA, 22 nt, Artificial Sequence
  SAMD9 targeting guide sequence portion
ggcauggauugaagaagauugu

SEQ ID NO: 15113 - RNA, 22 nt, Artificial Sequence
  SAMD9 targeting guide sequence portion
ggcauuuagacauuagaauguc

SEQ ID NO: 15114 - RNA, 22 nt, Artificial Sequence
  SAMD9 targeting guide sequence portion
ggcuacacagaaccccacuacu

SEQ ID NO: 15115 - RNA, 22 nt, Artificial Sequence
  SAMD9 targeting guide sequence portion
ggcuguaucuauaaccuugccg

SEQ ID NO: 15116 - RNA, 22 nt, Artificial Sequence
  SAMD9 targeting guide sequence portion
gggaaaauauuucucaaagaca

SEQ ID NO: 15117 - RNA, 22 nt, Artificial Sequence
  SAMD9 targeting guide sequence portion
gggguucuguguagccagcuua

SEQ ID NO: 15118 - RNA, 22 nt, Artificial Sequence
  SAMD9 targeting guide sequence portion
ggguacugagaucaaauucuug

SEQ ID NO: 15119 - RNA, 22 nt, Artificial Sequence
  SAMD9 targeting guide sequence portion
ggguucuguguagccagcuuau

SEQ ID NO: 15120 - RNA, 22 nt, Artificial Sequence
  SAMD9 targeting guide sequence portion
gguaaguagugggguucugugu

SEQ ID NO: 15121 - RNA, 22 nt, Artificial Sequence
  SAMD9 targeting guide sequence portion
gguacugagaucaaauucuugg

SEQ ID NO: 15122 - RNA, 22 nt, Artificial Sequence
  SAMD9 targeting guide sequence portion
gguuaacaucauugaugacaaa

SEQ ID NO: 15123 - RNA, 22 nt, Artificial Sequence
  SAMD9 targeting guide sequence portion
gguuauagauacagccucuagc

SEQ ID NO: 15124 - RNA, 22 nt, Artificial Sequence
  SAMD9 targeting guide sequence portion
gguucuguguagccagcuuauu

SEQ ID NO: 15125 - RNA, 22 nt, Artificial Sequence
  SAMD9 targeting guide sequence portion
gguuuaaagcauagaucuugag

SEQ ID NO: 15126 - RNA, 22 nt, Artificial Sequence
  SAMD9 targeting guide sequence portion
gguuugguuaacaucauugaug

SEQ ID NO: 15127 - RNA, 22 nt, Artificial Sequence
  SAMD9 targeting guide sequence portion
gguuuuugcugucuuugagaaa

SEQ ID NO: 15128 - RNA, 22 nt, Artificial Sequence
  SAMD9 targeting guide sequence portion
guaagaauaaauguugcuccuc

SEQ ID NO: 15129 - RNA, 22 nt, Artificial Sequence
  SAMD9 targeting guide sequence portion
guaaguagugggguucugugua

SEQ ID NO: 15130 - RNA, 22 nt, Artificial Sequence
  SAMD9 targeting guide sequence portion
guaauaagcuggcuacacagaa

SEQ ID NO: 15131 - RNA, 22 nt, Artificial Sequence
  SAMD9 targeting guide sequence portion
guacagaucugaagagcuagag

SEQ ID NO: 15132 - RNA, 22 nt, Artificial Sequence
  SAMD9 targeting guide sequence portion
guacaugcaguauuuaauuucc

SEQ ID NO: 15133 - RNA, 22 nt, Artificial Sequence
  SAMD9 targeting guide sequence portion
guacugagaucaaauucuugga

SEQ ID NO: 15134 - RNA, 22 nt, Artificial Sequence
  SAMD9 targeting guide sequence portion
guagaacucauaacauguuuaa

SEQ ID NO: 15135 - RNA, 22 nt, Artificial Sequence
  SAMD9 targeting guide sequence portion
guagacaaucuucuucaaucca

SEQ ID NO: 15136 - RNA, 22 nt, Artificial Sequence
  SAMD9 targeting guide sequence portion
guagcaaauauguuccuugguu

SEQ ID NO: 15137 - RNA, 22 nt, Artificial Sequence
  SAMD9 targeting guide sequence portion
guagccagcuuauuacacuaac

SEQ ID NO: 15138 - RNA, 22 nt, Artificial Sequence
  SAMD9 targeting guide sequence portion
guagugggguucuguguagcca

SEQ ID NO: 15139 - RNA, 22 nt, Artificial Sequence
  SAMD9 targeting guide sequence portion
guaucaugugcuuggcacucaa

SEQ ID NO: 15140 - RNA, 22 nt, Artificial Sequence
  SAMD9 targeting guide sequence portion
guaucuauaaccuugccgguuu

SEQ ID NO: 15141 - RNA, 22 nt, Artificial Sequence
  SAMD9 targeting guide sequence portion
guauuuaauuuccucuuaaaca

SEQ ID NO: 15142 - RNA, 22 nt, Artificial Sequence
  SAMD9 targeting guide sequence portion
gucaggagaaguuaguguaaua

SEQ ID NO: 15143 - RNA, 22 nt, Artificial Sequence
  SAMD9 targeting guide sequence portion
gucauagcuccuuauuauuuug

SEQ ID NO: 15144 - RNA, 22 nt, Artificial Sequence
  SAMD9 targeting guide sequence portion
gucaucaaugauguuaaccaaa

SEQ ID NO: 15145 - RNA, 22 nt, Artificial Sequence
  SAMD9 targeting guide sequence portion
guccucuguuuuggaagauccu

SEQ ID NO: 15146 - RNA, 22 nt, Artificial Sequence
  SAMD9 targeting guide sequence portion
gucuaaaugccauuugaguaga

SEQ ID NO: 15147 - RNA, 22 nt, Artificial Sequence
  SAMD9 targeting guide sequence portion
gucuacucaaauggcauuuaga

SEQ ID NO: 15148 - RNA, 22 nt, Artificial Sequence
  SAMD9 targeting guide sequence portion
gucugggaaaauauuucucaaa

SEQ ID NO: 15149 - RNA, 22 nt, Artificial Sequence
  SAMD9 targeting guide sequence portion
gucuuugagaaauauuuuccca

SEQ ID NO: 15150 - RNA, 22 nt, Artificial Sequence
  SAMD9 targeting guide sequence portion
gucuuuguagaacucauaacau

SEQ ID NO: 15151 - RNA, 22 nt, Artificial Sequence
  SAMD9 targeting guide sequence portion
gugaaaaaggaaggagugagau

SEQ ID NO: 15152 - RNA, 22 nt, Artificial Sequence
  SAMD9 targeting guide sequence portion
gugagauauaugaaaaguagca

SEQ ID NO: 15153 - RNA, 22 nt, Artificial Sequence
  SAMD9 targeting guide sequence portion
gugccaagcacaugauacauug

SEQ ID NO: 15154 - RNA, 22 nt, Artificial Sequence
  SAMD9 targeting guide sequence portion
gugcuuggcacucaaggaucuu

SEQ ID NO: 15155 - RNA, 22 nt, Artificial Sequence
  SAMD9 targeting guide sequence portion
gugggguucuguguagccagcu

SEQ ID NO: 15156 - RNA, 22 nt, Artificial Sequence
  SAMD9 targeting guide sequence portion
guguaauaagcuggcuacacag

SEQ ID NO: 15157 - RNA, 22 nt, Artificial Sequence
  SAMD9 targeting guide sequence portion
guguagccagcuuauuacacua

SEQ ID NO: 15158 - RNA, 22 nt, Artificial Sequence
  SAMD9 targeting guide sequence portion
guuaacaucauugaugacaaaa

SEQ ID NO: 15159 - RNA, 22 nt, Artificial Sequence
  SAMD9 targeting guide sequence portion
guuaaccaaaccaaggaacaua

SEQ ID NO: 15160 - RNA, 22 nt, Artificial Sequence
  SAMD9 targeting guide sequence portion
guuaguguaauaagcuggcuac

SEQ ID NO: 15161 - RNA, 22 nt, Artificial Sequence
  SAMD9 targeting guide sequence portion
guuauagauacagccucuagcu

SEQ ID NO: 15162 - RNA, 22 nt, Artificial Sequence
  SAMD9 targeting guide sequence portion
guuaugaguucuacaaagacaa

SEQ ID NO: 15163 - RNA, 22 nt, Artificial Sequence
  SAMD9 targeting guide sequence portion
guuccuugguuugguuaacauc

SEQ ID NO: 15164 - RNA, 22 nt, Artificial Sequence
  SAMD9 targeting guide sequence portion
guucuacaaagacaauagugaa

SEQ ID NO: 15165 - RNA, 22 nt, Artificial Sequence
  SAMD9 targeting guide sequence portion
guucuguguagccagcuuauua

SEQ ID NO: 15166 - RNA, 22 nt, Artificial Sequence
  SAMD9 targeting guide sequence portion
guugcuccucaguuugagaggu

SEQ ID NO: 15167 - RNA, 22 nt, Artificial Sequence
  SAMD9 targeting guide sequence portion
guuuaaagcauagaucuugagu

SEQ ID NO: 15168 - RNA, 22 nt, Artificial Sequence
  SAMD9 targeting guide sequence portion
guuuaagaggaaauuaaauacu

SEQ ID NO: 15169 - RNA, 22 nt, Artificial Sequence
  SAMD9 targeting guide sequence portion
guuugagagguuuuugcugucu

SEQ ID NO: 15170 - RNA, 22 nt, Artificial Sequence
  SAMD9 targeting guide sequence portion
guuugguuaacaucauugauga

SEQ ID NO: 15171 - RNA, 22 nt, Artificial Sequence
  SAMD9 targeting guide sequence portion
guuuuggaagauccuugagugc

SEQ ID NO: 15172 - RNA, 22 nt, Artificial Sequence
  SAMD9 targeting guide sequence portion
guuuuugcugucuuugagaaau

SEQ ID NO: 15173 - RNA, 22 nt, Artificial Sequence
  SAMD9 targeting guide sequence portion
uaaacauguuaugaguucuaca

SEQ ID NO: 15174 - RNA, 22 nt, Artificial Sequence
  SAMD9 targeting guide sequence portion
uaaaccggcaagguuauagaua

SEQ ID NO: 15175 - RNA, 22 nt, Artificial Sequence
  SAMD9 targeting guide sequence portion
uaaauacugcauguacagaucu

SEQ ID NO: 15176 - RNA, 22 nt, Artificial Sequence
  SAMD9 targeting guide sequence portion
uaaaugccauuugaguagacaa

SEQ ID NO: 15177 - RNA, 22 nt, Artificial Sequence
  SAMD9 targeting guide sequence portion
uaaauggguacugagaucaaau

SEQ ID NO: 15178 - RNA, 22 nt, Artificial Sequence
  SAMD9 targeting guide sequence portion
uaaauguugcuccucaguuuga

SEQ ID NO: 15179 - RNA, 22 nt, Artificial Sequence
  SAMD9 targeting guide sequence portion
uaacaucauugaugacaaaaua

SEQ ID NO: 15180 - RNA, 22 nt, Artificial Sequence
  SAMD9 targeting guide sequence portion
uaacauguuuaagaggaaauua

SEQ ID NO: 15181 - RNA, 22 nt, Artificial Sequence
  SAMD9 targeting guide sequence portion
uaaccaaaccaaggaacauauu

SEQ ID NO: 15182 - RNA, 22 nt, Artificial Sequence
  SAMD9 targeting guide sequence portion
uaaccuugccgguuuaaagcau

SEQ ID NO: 15183 - RNA, 22 nt, Artificial Sequence
  SAMD9 targeting guide sequence portion
uaacuucuccugacuccaguca

SEQ ID NO: 15184 - RNA, 22 nt, Artificial Sequence
  SAMD9 targeting guide sequence portion
uaagaauaaauguugcuccuca

SEQ ID NO: 15185 - RNA, 22 nt, Artificial Sequence
  SAMD9 targeting guide sequence portion
uaagaggaaauuaaauacugca

SEQ ID NO: 15186 - RNA, 22 nt, Artificial Sequence
  SAMD9 targeting guide sequence portion
uaagcagaucaucaauguauca

SEQ ID NO: 15187 - RNA, 22 nt, Artificial Sequence
  SAMD9 targeting guide sequence portion
uaagcuggcuacacagaacccc

SEQ ID NO: 15188 - RNA, 22 nt, Artificial Sequence
  SAMD9 targeting guide sequence portion
uaaggagcuaugacuggaguca

SEQ ID NO: 15189 - RNA, 22 nt, Artificial Sequence
  SAMD9 targeting guide sequence portion
uaaguagugggguucuguguag

SEQ ID NO: 15190 - RNA, 22 nt, Artificial Sequence
  SAMD9 targeting guide sequence portion
uaauaagcuggcuacacagaac

SEQ ID NO: 15191 - RNA, 22 nt, Artificial Sequence
  SAMD9 targeting guide sequence portion
uaauaaggagcuaugacuggag

SEQ ID NO: 15192 - RNA, 22 nt, Artificial Sequence
  SAMD9 targeting guide sequence portion
uaaugucuaaaugccauuugag

SEQ ID NO: 15193 - RNA, 22 nt, Artificial Sequence
  SAMD9 targeting guide sequence portion
uaauuuccucuuaaacauguua

SEQ ID NO: 15194 - RNA, 22 nt, Artificial Sequence
  SAMD9 targeting guide sequence portion
uacaaagacaauagugaaaaag

SEQ ID NO: 15195 - RNA, 22 nt, Artificial Sequence
  SAMD9 targeting guide sequence portion
uacacagaaccccacuacuuac

SEQ ID NO: 15196 - RNA, 22 nt, Artificial Sequence
  SAMD9 targeting guide sequence portion
uacacuaacuucuccugacucc

SEQ ID NO: 15197 - RNA, 22 nt, Artificial Sequence
  SAMD9 targeting guide sequence portion
uacagaucugaagagcuagagg

SEQ ID NO: 15198 - RNA, 22 nt, Artificial Sequence
  SAMD9 targeting guide sequence portion
uacagccucuagcucuucagau

SEQ ID NO: 15199 - RNA, 22 nt, Artificial Sequence
  SAMD9 targeting guide sequence portion
uacaugcaguauuuaauuuccu

SEQ ID NO: 15200 - RNA, 22 nt, Artificial Sequence
  SAMD9 targeting guide sequence portion
uacauugaugaucugcuuagua

SEQ ID NO: 15201 - RNA, 22 nt, Artificial Sequence
  SAMD9 targeting guide sequence portion
uaccaggcauggauugaagaag

SEQ ID NO: 15202 - RNA, 22 nt, Artificial Sequence
  SAMD9 targeting guide sequence portion
uacuaagcagaucaucaaugua

SEQ ID NO: 15203 - RNA, 22 nt, Artificial Sequence
  SAMD9 targeting guide sequence portion
uacucaaauggcauuuagacau

SEQ ID NO: 15204 - RNA, 22 nt, Artificial Sequence
  SAMD9 targeting guide sequence portion
uacugagaucaaauucuuggag

SEQ ID NO: 15205 - RNA, 22 nt, Artificial Sequence
  SAMD9 targeting guide sequence portion
uacugcauguacagaucugaag

SEQ ID NO: 15206 - RNA, 22 nt, Artificial Sequence
  SAMD9 targeting guide sequence portion
uacuuaccaggcauggauugaa

SEQ ID NO: 15207 - RNA, 22 nt, Artificial Sequence
  SAMD9 targeting guide sequence portion
uacuuuucauauaucucacucc

SEQ ID NO: 15208 - RNA, 22 nt, Artificial Sequence
  SAMD9 targeting guide sequence portion
uagaacucauaacauguuuaag

SEQ ID NO: 15209 - RNA, 22 nt, Artificial Sequence
  SAMD9 targeting guide sequence portion
uagaaugucugggaaaauauuu

SEQ ID NO: 15210 - RNA, 22 nt, Artificial Sequence
  SAMD9 targeting guide sequence portion
uagacaaucuucuucaauccau

SEQ ID NO: 15211 - RNA, 22 nt, Artificial Sequence
  SAMD9 targeting guide sequence portion
uagacauuagaaugucugggaa

SEQ ID NO: 15212 - RNA, 22 nt, Artificial Sequence
  SAMD9 targeting guide sequence portion
uagaggcuguaucuauaaccuu

SEQ ID NO: 15213 - RNA, 22 nt, Artificial Sequence
  SAMD9 targeting guide sequence portion
uagauacagccucuagcucuuc

SEQ ID NO: 15214 - RNA, 22 nt, Artificial Sequence
  SAMD9 targeting guide sequence portion
uagcaaauauguuccuugguuu

SEQ ID NO: 15215 - RNA, 22 nt, Artificial Sequence
  SAMD9 targeting guide sequence portion
uagccagcuuauuacacuaacu

SEQ ID NO: 15216 - RNA, 22 nt, Artificial Sequence
  SAMD9 targeting guide sequence portion
uagcuccuuauuauuuugucau

SEQ ID NO: 15217 - RNA, 22 nt, Artificial Sequence
  SAMD9 targeting guide sequence portion
uagcucuucagaucuguacaug

SEQ ID NO: 15218 - RNA, 22 nt, Artificial Sequence
  SAMD9 targeting guide sequence portion
uaguaagaauaaauguugcucc

SEQ ID NO: 15219 - RNA, 22 nt, Artificial Sequence
  SAMD9 targeting guide sequence portion
uagugaaaaaggaaggagugag

SEQ ID NO: 15220 - RNA, 22 nt, Artificial Sequence
  SAMD9 targeting guide sequence portion
uagugggguucuguguagccag

SEQ ID NO: 15221 - RNA, 22 nt, Artificial Sequence
  SAMD9 targeting guide sequence portion
uaguguaauaagcuggcuacac

SEQ ID NO: 15222 - RNA, 22 nt, Artificial Sequence
  SAMD9 targeting guide sequence portion
uauaaccuugccgguuuaaagc

SEQ ID NO: 15223 - RNA, 22 nt, Artificial Sequence
  SAMD9 targeting guide sequence portion
uauagauacagccucuagcucu

SEQ ID NO: 15224 - RNA, 22 nt, Artificial Sequence
  SAMD9 targeting guide sequence portion
uauaucucacuccuuccuuuuu

SEQ ID NO: 15225 - RNA, 22 nt, Artificial Sequence
  SAMD9 targeting guide sequence portion
uauaugaaaaguagcaaauaug

SEQ ID NO: 15226 - RNA, 22 nt, Artificial Sequence
  SAMD9 targeting guide sequence portion
uaucaugugcuuggcacucaag

SEQ ID NO: 15227 - RNA, 22 nt, Artificial Sequence
  SAMD9 targeting guide sequence portion
uaucuauaaccuugccgguuua

SEQ ID NO: 15228 - RNA, 22 nt, Artificial Sequence
  SAMD9 targeting guide sequence portion
uaucucacuccuuccuuuuuca

SEQ ID NO: 15229 - RNA, 22 nt, Artificial Sequence
  SAMD9 targeting guide sequence portion
uaugaaaaguagcaaauauguu

SEQ ID NO: 15230 - RNA, 22 nt, Artificial Sequence
  SAMD9 targeting guide sequence portion
uaugacuggagucaggagaagu

SEQ ID NO: 15231 - RNA, 22 nt, Artificial Sequence
  SAMD9 targeting guide sequence portion
uaugaguucuacaaagacaaua

SEQ ID NO: 15232 - RNA, 22 nt, Artificial Sequence
  SAMD9 targeting guide sequence portion
uaugcuuuaaaccggcaagguu

SEQ ID NO: 15233 - RNA, 22 nt, Artificial Sequence
  SAMD9 targeting guide sequence portion
uauguuccuugguuugguuaac

SEQ ID NO: 15234 - RNA, 22 nt, Artificial Sequence
  SAMD9 targeting guide sequence portion
uauuacacuaacuucuccugac

SEQ ID NO: 15235 - RNA, 22 nt, Artificial Sequence
  SAMD9 targeting guide sequence portion
uauuauuuugucaucaaugaug

SEQ ID NO: 15236 - RNA, 22 nt, Artificial Sequence
  SAMD9 targeting guide sequence portion
uauucuuacuaagcagaucauc

SEQ ID NO: 15237 - RNA, 22 nt, Artificial Sequence
  SAMD9 targeting guide sequence portion
uauucuuccuccaagaauuuga

SEQ ID NO: 15238 - RNA, 22 nt, Artificial Sequence
  SAMD9 targeting guide sequence portion
uauugucuuuguagaacucaua

SEQ ID NO: 15239 - RNA, 22 nt, Artificial Sequence
  SAMD9 targeting guide sequence portion
uauuuaauuuccucuuaaacau

SEQ ID NO: 15240 - RNA, 22 nt, Artificial Sequence
  SAMD9 targeting guide sequence portion
uauuucucaaagacagcaaaaa

SEQ ID NO: 15241 - RNA, 22 nt, Artificial Sequence
  SAMD9 targeting guide sequence portion
uauuugcuacuuuucauauauc

SEQ ID NO: 15242 - RNA, 22 nt, Artificial Sequence
  SAMD9 targeting guide sequence portion
uauuuucccagacauucuaaug

SEQ ID NO: 15243 - RNA, 22 nt, Artificial Sequence
  SAMD9 targeting guide sequence portion
uauuuugucaucaaugauguua

SEQ ID NO: 15244 - RNA, 22 nt, Artificial Sequence
  SAMD9 targeting guide sequence portion
ucaaacugaggagcaacauuua

SEQ ID NO: 15245 - RNA, 22 nt, Artificial Sequence
  SAMD9 targeting guide sequence portion
ucaaagacagcaaaaaccucuc

SEQ ID NO: 15246 - RNA, 22 nt, Artificial Sequence
  SAMD9 targeting guide sequence portion
ucaaauggcauuuagacauuag

SEQ ID NO: 15247 - RNA, 22 nt, Artificial Sequence
  SAMD9 targeting guide sequence portion
ucaaauucuuggaggaagaaua

SEQ ID NO: 15248 - RNA, 22 nt, Artificial Sequence
  SAMD9 targeting guide sequence portion
ucaagaucuaugcuuuaaaccg

SEQ ID NO: 15249 - RNA, 22 nt, Artificial Sequence
  SAMD9 targeting guide sequence portion
ucaauccaugccugguaaguag

SEQ ID NO: 15250 - RNA, 22 nt, Artificial Sequence
  SAMD9 targeting guide sequence portion
ucaaugauguuaaccaaaccaa

SEQ ID NO: 15251 - RNA, 22 nt, Artificial Sequence
  SAMD9 targeting guide sequence portion
ucaauguaucaugugcuuggca

SEQ ID NO: 15252 - RNA, 22 nt, Artificial Sequence
  SAMD9 targeting guide sequence portion
ucacuauugucuuuguagaacu

SEQ ID NO: 15253 - RNA, 22 nt, Artificial Sequence
  SAMD9 targeting guide sequence portion
ucacuccuuccuuuuucacuau

SEQ ID NO: 15254 - RNA, 22 nt, Artificial Sequence
  SAMD9 targeting guide sequence portion
ucagaucuguacaugcaguauu

SEQ ID NO: 15255 - RNA, 22 nt, Artificial Sequence
  SAMD9 targeting guide sequence portion
ucaggagaaguuaguguaauaa

SEQ ID NO: 15256 - RNA, 22 nt, Artificial Sequence
  SAMD9 targeting guide sequence portion
ucaguuugagagguuuuugcug

SEQ ID NO: 15257 - RNA, 22 nt, Artificial Sequence
  SAMD9 targeting guide sequence portion
ucauaacauguuuaagaggaaa

SEQ ID NO: 15258 - RNA, 22 nt, Artificial Sequence
  SAMD9 targeting guide sequence portion
ucauagcuccuuauuauuuugu

SEQ ID NO: 15259 - RNA, 22 nt, Artificial Sequence
  SAMD9 targeting guide sequence portion
ucauauaucucacuccuuccuu

SEQ ID NO: 15260 - RNA, 22 nt, Artificial Sequence
  SAMD9 targeting guide sequence portion
ucaucaaugauguuaaccaaac

SEQ ID NO: 15261 - RNA, 22 nt, Artificial Sequence
  SAMD9 targeting guide sequence portion
ucaucaauguaucaugugcuug

SEQ ID NO: 15262 - RNA, 22 nt, Artificial Sequence
  SAMD9 targeting guide sequence portion
ucaugugcuuggcacucaagga

SEQ ID NO: 15263 - RNA, 22 nt, Artificial Sequence
  SAMD9 targeting guide sequence portion
ucauugaugacaaaauaauaag

SEQ ID NO: 15264 - RNA, 22 nt, Artificial Sequence
  SAMD9 targeting guide sequence portion
uccaagaauuugaucucaguac

SEQ ID NO: 15265 - RNA, 22 nt, Artificial Sequence
  SAMD9 targeting guide sequence portion
uccagucauagcuccuuauuau

SEQ ID NO: 15266 - RNA, 22 nt, Artificial Sequence
  SAMD9 targeting guide sequence portion
uccaugccugguaaguaguggg

SEQ ID NO: 15267 - RNA, 22 nt, Artificial Sequence
  SAMD9 targeting guide sequence portion
ucccagacauucuaaugucuaa

SEQ ID NO: 15268 - RNA, 22 nt, Artificial Sequence
  SAMD9 targeting guide sequence portion
uccucaguuugagagguuuuug

SEQ ID NO: 15269 - RNA, 22 nt, Artificial Sequence
  SAMD9 targeting guide sequence portion
uccuccaagaauuugaucucag

SEQ ID NO: 15270 - RNA, 22 nt, Artificial Sequence
  SAMD9 targeting guide sequence portion
uccucuguuuuggaagauccuu

SEQ ID NO: 15271 - RNA, 22 nt, Artificial Sequence
  SAMD9 targeting guide sequence portion
uccucuuaaacauguuaugagu

SEQ ID NO: 15272 - RNA, 22 nt, Artificial Sequence
  SAMD9 targeting guide sequence portion
uccugacuccagucauagcucc

SEQ ID NO: 15273 - RNA, 22 nt, Artificial Sequence
  SAMD9 targeting guide sequence portion
uccuuauuauuuugucaucaau

SEQ ID NO: 15274 - RNA, 22 nt, Artificial Sequence
  SAMD9 targeting guide sequence portion
uccuuccuuuuucacuauuguc

SEQ ID NO: 15275 - RNA, 22 nt, Artificial Sequence
  SAMD9 targeting guide sequence portion
uccuugagugccaagcacauga

SEQ ID NO: 15276 - RNA, 22 nt, Artificial Sequence
  SAMD9 targeting guide sequence portion
uccuugguuugguuaacaucau

SEQ ID NO: 15277 - RNA, 22 nt, Artificial Sequence
  SAMD9 targeting guide sequence portion
uccuuuuucacuauugucuuug

SEQ ID NO: 15278 - RNA, 22 nt, Artificial Sequence
  SAMD9 targeting guide sequence portion
ucuaaaugccauuugaguagac

SEQ ID NO: 15279 - RNA, 22 nt, Artificial Sequence
  SAMD9 targeting guide sequence portion
ucuaaugucuaaaugccauuug

SEQ ID NO: 15280 - RNA, 22 nt, Artificial Sequence
  SAMD9 targeting guide sequence portion
ucuacaaagacaauagugaaaa

SEQ ID NO: 15281 - RNA, 22 nt, Artificial Sequence
  SAMD9 targeting guide sequence portion
ucuacucaaauggcauuuagac

SEQ ID NO: 15282 - RNA, 22 nt, Artificial Sequence
  SAMD9 targeting guide sequence portion
ucuagcucuucagaucuguaca

SEQ ID NO: 15283 - RNA, 22 nt, Artificial Sequence
  SAMD9 targeting guide sequence portion
ucuauaaccuugccgguuuaaa

SEQ ID NO: 15284 - RNA, 22 nt, Artificial Sequence
  SAMD9 targeting guide sequence portion
ucuaugcuuuaaaccggcaagg

SEQ ID NO: 15285 - RNA, 22 nt, Artificial Sequence
  SAMD9 targeting guide sequence portion
ucucaaacugaggagcaacauu

SEQ ID NO: 15286 - RNA, 22 nt, Artificial Sequence
  SAMD9 targeting guide sequence portion
ucucaaagacagcaaaaaccuc

SEQ ID NO: 15287 - RNA, 22 nt, Artificial Sequence
  SAMD9 targeting guide sequence portion
ucucacuccuuccuuuuucacu

SEQ ID NO: 15288 - RNA, 22 nt, Artificial Sequence
  SAMD9 targeting guide sequence portion
ucuccugacuccagucauagcu

SEQ ID NO: 15289 - RNA, 22 nt, Artificial Sequence
  SAMD9 targeting guide sequence portion
ucugaagagcuagaggcuguau

SEQ ID NO: 15290 - RNA, 22 nt, Artificial Sequence
  SAMD9 targeting guide sequence portion
ucugcuuaguaagaauaaaugu

SEQ ID NO: 15291 - RNA, 22 nt, Artificial Sequence
  SAMD9 targeting guide sequence portion
ucugggaaaauauuucucaaag

SEQ ID NO: 15292 - RNA, 22 nt, Artificial Sequence
  SAMD9 targeting guide sequence portion
ucuguacaugcaguauuuaauu

SEQ ID NO: 15293 - RNA, 22 nt, Artificial Sequence
  SAMD9 targeting guide sequence portion
ucuguguagccagcuuauuaca

SEQ ID NO: 15294 - RNA, 22 nt, Artificial Sequence
  SAMD9 targeting guide sequence portion
ucuguuuuggaagauccuugag

SEQ ID NO: 15295 - RNA, 22 nt, Artificial Sequence
  SAMD9 targeting guide sequence portion
ucuuaaacauguuaugaguucu

SEQ ID NO: 15296 - RNA, 22 nt, Artificial Sequence
  SAMD9 targeting guide sequence portion
ucuuacuaagcagaucaucaau

SEQ ID NO: 15297 - RNA, 22 nt, Artificial Sequence
  SAMD9 targeting guide sequence portion
ucuucaauccaugccugguaag

SEQ ID NO: 15298 - RNA, 22 nt, Artificial Sequence
  SAMD9 targeting guide sequence portion
ucuucagaucuguacaugcagu

SEQ ID NO: 15299 - RNA, 22 nt, Artificial Sequence
  SAMD9 targeting guide sequence portion
ucuuccuccaagaauuugaucu

SEQ ID NO: 15300 - RNA, 22 nt, Artificial Sequence
  SAMD9 targeting guide sequence portion
ucuucuucaauccaugccuggu

SEQ ID NO: 15301 - RNA, 22 nt, Artificial Sequence
  SAMD9 targeting guide sequence portion
ucuuugagaaauauuuucccag

SEQ ID NO: 15302 - RNA, 22 nt, Artificial Sequence
  SAMD9 targeting guide sequence portion
ucuuuguagaacucauaacaug

SEQ ID NO: 15303 - RNA, 22 nt, Artificial Sequence
  SAMD9 targeting guide sequence portion
ugaaaaaggaaggagugagaua

SEQ ID NO: 15304 - RNA, 22 nt, Artificial Sequence
  SAMD9 targeting guide sequence portion
ugaaaaguagcaaauauguucc

SEQ ID NO: 15305 - RNA, 22 nt, Artificial Sequence
  SAMD9 targeting guide sequence portion
ugaagaagauugucuacucaaa

SEQ ID NO: 15306 - RNA, 22 nt, Artificial Sequence
  SAMD9 targeting guide sequence portion
ugaagagcuagaggcuguaucu

SEQ ID NO: 15307 - RNA, 22 nt, Artificial Sequence
  SAMD9 targeting guide sequence portion
ugacaaaauaauaaggagcuau

SEQ ID NO: 15308 - RNA, 22 nt, Artificial Sequence
  SAMD9 targeting guide sequence portion
ugacuccagucauagcuccuua

SEQ ID NO: 15309 - RNA, 22 nt, Artificial Sequence
  SAMD9 targeting guide sequence portion
ugacuggagucaggagaaguua

SEQ ID NO: 15310 - RNA, 22 nt, Artificial Sequence
  SAMD9 targeting guide sequence portion
ugagaaauauuuucccagacau

SEQ ID NO: 15311 - RNA, 22 nt, Artificial Sequence
  SAMD9 targeting guide sequence portion
ugagagguuuuugcugucuuug

SEQ ID NO: 15312 - RNA, 22 nt, Artificial Sequence
  SAMD9 targeting guide sequence portion
ugagauauaugaaaaguagcaa

SEQ ID NO: 15313 - RNA, 22 nt, Artificial Sequence
  SAMD9 targeting guide sequence portion
ugagaucaaauucuuggaggaa

SEQ ID NO: 15314 - RNA, 22 nt, Artificial Sequence
  SAMD9 targeting guide sequence portion
ugaggagcaacauuuauucuua

SEQ ID NO: 15315 - RNA, 22 nt, Artificial Sequence
  SAMD9 targeting guide sequence portion
ugaguagacaaucuucuucaau

SEQ ID NO: 15316 - RNA, 22 nt, Artificial Sequence
  SAMD9 targeting guide sequence portion
ugagugccaagcacaugauaca

SEQ ID NO: 15317 - RNA, 22 nt, Artificial Sequence
  SAMD9 targeting guide sequence portion
ugaguucuacaaagacaauagu

SEQ ID NO: 15318 - RNA, 22 nt, Artificial Sequence
  SAMD9 targeting guide sequence portion
ugauacauugaugaucugcuua

SEQ ID NO: 15319 - RNA, 22 nt, Artificial Sequence
  SAMD9 targeting guide sequence portion
ugauauucuuccuccaagaauu

SEQ ID NO: 15320 - RNA, 22 nt, Artificial Sequence
  SAMD9 targeting guide sequence portion
ugaucugcuuaguaagaauaaa

SEQ ID NO: 15321 - RNA, 22 nt, Artificial Sequence
  SAMD9 targeting guide sequence portion
ugaugacaaaauaauaaggagc

SEQ ID NO: 15322 - RNA, 22 nt, Artificial Sequence
  SAMD9 targeting guide sequence portion
ugaugaucugcuuaguaagaau

SEQ ID NO: 15323 - RNA, 22 nt, Artificial Sequence
  SAMD9 targeting guide sequence portion
ugauguuaaccaaaccaaggaa

SEQ ID NO: 15324 - RNA, 22 nt, Artificial Sequence
  SAMD9 targeting guide sequence portion
ugcaguauuuaauuuccucuua

SEQ ID NO: 15325 - RNA, 22 nt, Artificial Sequence
  SAMD9 targeting guide sequence portion
ugcauguacagaucugaagagc

SEQ ID NO: 15326 - RNA, 22 nt, Artificial Sequence
  SAMD9 targeting guide sequence portion
ugccaagcacaugauacauuga

SEQ ID NO: 15327 - RNA, 22 nt, Artificial Sequence
  SAMD9 targeting guide sequence portion
ugccauuugaguagacaaucuu

SEQ ID NO: 15328 - RNA, 22 nt, Artificial Sequence
  SAMD9 targeting guide sequence portion
ugccgguuuaaagcauagaucu

SEQ ID NO: 15329 - RNA, 22 nt, Artificial Sequence
  SAMD9 targeting guide sequence portion
ugccugguaaguagugggguuc

SEQ ID NO: 15330 - RNA, 22 nt, Artificial Sequence
  SAMD9 targeting guide sequence portion
ugcuacuuuucauauaucucac

SEQ ID NO: 15331 - RNA, 22 nt, Artificial Sequence
  SAMD9 targeting guide sequence portion
ugcuccucaguuugagagguuu

SEQ ID NO: 15332 - RNA, 22 nt, Artificial Sequence
  SAMD9 targeting guide sequence portion
ugcugucuuugagaaauauuuu

SEQ ID NO: 15333 - RNA, 22 nt, Artificial Sequence
  SAMD9 targeting guide sequence portion
ugcuuaguaagaauaaauguug

SEQ ID NO: 15334 - RNA, 22 nt, Artificial Sequence
  SAMD9 targeting guide sequence portion
ugcuuggcacucaaggaucuuc

SEQ ID NO: 15335 - RNA, 22 nt, Artificial Sequence
  SAMD9 targeting guide sequence portion
ugcuuuaaaccggcaagguuau

SEQ ID NO: 15336 - RNA, 22 nt, Artificial Sequence
  SAMD9 targeting guide sequence portion
uggaagauccuugagugccaag

SEQ ID NO: 15337 - RNA, 22 nt, Artificial Sequence
  SAMD9 targeting guide sequence portion
uggacucaagaucuaugcuuua

SEQ ID NO: 15338 - RNA, 22 nt, Artificial Sequence
  SAMD9 targeting guide sequence portion
uggagucaggagaaguuagugu

SEQ ID NO: 15339 - RNA, 22 nt, Artificial Sequence
  SAMD9 targeting guide sequence portion
uggauugaagaagauugucuac

SEQ ID NO: 15340 - RNA, 22 nt, Artificial Sequence
  SAMD9 targeting guide sequence portion
uggcacucaaggaucuuccaaa

SEQ ID NO: 15341 - RNA, 22 nt, Artificial Sequence
  SAMD9 targeting guide sequence portion
uggcauuuagacauuagaaugu

SEQ ID NO: 15342 - RNA, 22 nt, Artificial Sequence
  SAMD9 targeting guide sequence portion
uggcuacacagaaccccacuac

SEQ ID NO: 15343 - RNA, 22 nt, Artificial Sequence
  SAMD9 targeting guide sequence portion
ugggaaaauauuucucaaagac

SEQ ID NO: 15344 - RNA, 22 nt, Artificial Sequence
  SAMD9 targeting guide sequence portion
ugggguucuguguagccagcuu

SEQ ID NO: 15345 - RNA, 22 nt, Artificial Sequence
  SAMD9 targeting guide sequence portion
uggguacugagaucaaauucuu

SEQ ID NO: 15346 - RNA, 22 nt, Artificial Sequence
  SAMD9 targeting guide sequence portion
ugguaaguagugggguucugug

SEQ ID NO: 15347 - RNA, 22 nt, Artificial Sequence
  SAMD9 targeting guide sequence portion
ugguuaacaucauugaugacaa

SEQ ID NO: 15348 - RNA, 22 nt, Artificial Sequence
  SAMD9 targeting guide sequence portion
ugguuugguuaacaucauugau

SEQ ID NO: 15349 - RNA, 22 nt, Artificial Sequence
  SAMD9 targeting guide sequence portion
uguaauaagcuggcuacacaga

SEQ ID NO: 15350 - RNA, 22 nt, Artificial Sequence
  SAMD9 targeting guide sequence portion
uguacagaucugaagagcuaga

SEQ ID NO: 15351 - RNA, 22 nt, Artificial Sequence
  SAMD9 targeting guide sequence portion
uguacaugcaguauuuaauuuc

SEQ ID NO: 15352 - RNA, 22 nt, Artificial Sequence
  SAMD9 targeting guide sequence portion
uguagaacucauaacauguuua

SEQ ID NO: 15353 - RNA, 22 nt, Artificial Sequence
  SAMD9 targeting guide sequence portion
uguagccagcuuauuacacuaa

SEQ ID NO: 15354 - RNA, 22 nt, Artificial Sequence
  SAMD9 targeting guide sequence portion
uguaucaugugcuuggcacuca

SEQ ID NO: 15355 - RNA, 22 nt, Artificial Sequence
  SAMD9 targeting guide sequence portion
uguaucuauaaccuugccgguu

SEQ ID NO: 15356 - RNA, 22 nt, Artificial Sequence
  SAMD9 targeting guide sequence portion
ugucaucaaugauguuaaccaa

SEQ ID NO: 15357 - RNA, 22 nt, Artificial Sequence
  SAMD9 targeting guide sequence portion
ugucuaaaugccauuugaguag

SEQ ID NO: 15358 - RNA, 22 nt, Artificial Sequence
  SAMD9 targeting guide sequence portion
ugucuacucaaauggcauuuag

SEQ ID NO: 15359 - RNA, 22 nt, Artificial Sequence
  SAMD9 targeting guide sequence portion
ugucugggaaaauauuucucaa

SEQ ID NO: 15360 - RNA, 22 nt, Artificial Sequence
  SAMD9 targeting guide sequence portion
ugucuuugagaaauauuuuccc

SEQ ID NO: 15361 - RNA, 22 nt, Artificial Sequence
  SAMD9 targeting guide sequence portion
ugucuuuguagaacucauaaca

SEQ ID NO: 15362 - RNA, 22 nt, Artificial Sequence
  SAMD9 targeting guide sequence portion
ugugcuuggcacucaaggaucu

SEQ ID NO: 15363 - RNA, 22 nt, Artificial Sequence
  SAMD9 targeting guide sequence portion
uguguagccagcuuauuacacu

SEQ ID NO: 15364 - RNA, 22 nt, Artificial Sequence
  SAMD9 targeting guide sequence portion
uguuaaccaaaccaaggaacau

SEQ ID NO: 15365 - RNA, 22 nt, Artificial Sequence
  SAMD9 targeting guide sequence portion
uguuaugaguucuacaaagaca

SEQ ID NO: 15366 - RNA, 22 nt, Artificial Sequence
  SAMD9 targeting guide sequence portion
uguuccuugguuugguuaacau

SEQ ID NO: 15367 - RNA, 22 nt, Artificial Sequence
  SAMD9 targeting guide sequence portion
uguugcuccucaguuugagagg

SEQ ID NO: 15368 - RNA, 22 nt, Artificial Sequence
  SAMD9 targeting guide sequence portion
uguuuaagaggaaauuaaauac

SEQ ID NO: 15369 - RNA, 22 nt, Artificial Sequence
  SAMD9 targeting guide sequence portion
uguuuuggaagauccuugagug

SEQ ID NO: 15370 - RNA, 22 nt, Artificial Sequence
  SAMD9 targeting guide sequence portion
uuaaacauguuaugaguucuac

SEQ ID NO: 15371 - RNA, 22 nt, Artificial Sequence
  SAMD9 targeting guide sequence portion
uuaaaccggcaagguuauagau

SEQ ID NO: 15372 - RNA, 22 nt, Artificial Sequence
  SAMD9 targeting guide sequence portion
uuaaagcauagaucuugagucc

SEQ ID NO: 15373 - RNA, 22 nt, Artificial Sequence
  SAMD9 targeting guide sequence portion
uuaaauacugcauguacagauc

SEQ ID NO: 15374 - RNA, 22 nt, Artificial Sequence
  SAMD9 targeting guide sequence portion
uuaaauggguacugagaucaaa

SEQ ID NO: 15375 - RNA, 22 nt, Artificial Sequence
  SAMD9 targeting guide sequence portion
uuaacaucauugaugacaaaau

SEQ ID NO: 15376 - RNA, 22 nt, Artificial Sequence
  SAMD9 targeting guide sequence portion
uuaaccaaaccaaggaacauau

SEQ ID NO: 15377 - RNA, 22 nt, Artificial Sequence
  SAMD9 targeting guide sequence portion
uuaagaggaaauuaaauacugc

SEQ ID NO: 15378 - RNA, 22 nt, Artificial Sequence
  SAMD9 targeting guide sequence portion
uuaauuuccucuuaaacauguu

SEQ ID NO: 15379 - RNA, 22 nt, Artificial Sequence
  SAMD9 targeting guide sequence portion
uuacacuaacuucuccugacuc

SEQ ID NO: 15380 - RNA, 22 nt, Artificial Sequence
  SAMD9 targeting guide sequence portion
uuaccaggcauggauugaagaa

SEQ ID NO: 15381 - RNA, 22 nt, Artificial Sequence
  SAMD9 targeting guide sequence portion
uuacuaagcagaucaucaaugu

SEQ ID NO: 15382 - RNA, 22 nt, Artificial Sequence
  SAMD9 targeting guide sequence portion
uuagaaugucugggaaaauauu

SEQ ID NO: 15383 - RNA, 22 nt, Artificial Sequence
  SAMD9 targeting guide sequence portion
uuagacauuagaaugucuggga

SEQ ID NO: 15384 - RNA, 22 nt, Artificial Sequence
  SAMD9 targeting guide sequence portion
uuaguaagaauaaauguugcuc

SEQ ID NO: 15385 - RNA, 22 nt, Artificial Sequence
  SAMD9 targeting guide sequence portion
uuaguguaauaagcuggcuaca

SEQ ID NO: 15386 - RNA, 22 nt, Artificial Sequence
  SAMD9 targeting guide sequence portion
uuauagauacagccucuagcuc

SEQ ID NO: 15387 - RNA, 22 nt, Artificial Sequence
  SAMD9 targeting guide sequence portion
uuaugaguucuacaaagacaau

SEQ ID NO: 15388 - RNA, 22 nt, Artificial Sequence
  SAMD9 targeting guide sequence portion
uuauuacacuaacuucuccuga

SEQ ID NO: 15389 - RNA, 22 nt, Artificial Sequence
  SAMD9 targeting guide sequence portion
uuauuauuuugucaucaaugau

SEQ ID NO: 15390 - RNA, 22 nt, Artificial Sequence
  SAMD9 targeting guide sequence portion
uuauucuuacuaagcagaucau

SEQ ID NO: 15391 - RNA, 22 nt, Artificial Sequence
  SAMD9 targeting guide sequence portion
uuauuuugucaucaaugauguu

SEQ ID NO: 15392 - RNA, 22 nt, Artificial Sequence
  SAMD9 targeting guide sequence portion
uucaauccaugccugguaagua

SEQ ID NO: 15393 - RNA, 22 nt, Artificial Sequence
  SAMD9 targeting guide sequence portion
uucacuauugucuuuguagaac

SEQ ID NO: 15394 - RNA, 22 nt, Artificial Sequence
  SAMD9 targeting guide sequence portion
uucagaucuguacaugcaguau

SEQ ID NO: 15395 - RNA, 22 nt, Artificial Sequence
  SAMD9 targeting guide sequence portion
uucauauaucucacuccuuccu

SEQ ID NO: 15396 - RNA, 22 nt, Artificial Sequence
  SAMD9 targeting guide sequence portion
uucccagacauucuaaugucua

SEQ ID NO: 15397 - RNA, 22 nt, Artificial Sequence
  SAMD9 targeting guide sequence portion
uuccuccaagaauuugaucuca

SEQ ID NO: 15398 - RNA, 22 nt, Artificial Sequence
  SAMD9 targeting guide sequence portion
uuccucuuaaacauguuaugag

SEQ ID NO: 15399 - RNA, 22 nt, Artificial Sequence
  SAMD9 targeting guide sequence portion
uuccuugguuugguuaacauca

SEQ ID NO: 15400 - RNA, 22 nt, Artificial Sequence
  SAMD9 targeting guide sequence portion
uuccuuuuucacuauugucuuu

SEQ ID NO: 15401 - RNA, 22 nt, Artificial Sequence
  SAMD9 targeting guide sequence portion
uucuaaugucuaaaugccauuu

SEQ ID NO: 15402 - RNA, 22 nt, Artificial Sequence
  SAMD9 targeting guide sequence portion
uucuacaaagacaauagugaaa

SEQ ID NO: 15403 - RNA, 22 nt, Artificial Sequence
  SAMD9 targeting guide sequence portion
uucucaaagacagcaaaaaccu

SEQ ID NO: 15404 - RNA, 22 nt, Artificial Sequence
  SAMD9 targeting guide sequence portion
uucuccugacuccagucauagc

SEQ ID NO: 15405 - RNA, 22 nt, Artificial Sequence
  SAMD9 targeting guide sequence portion
uucuguguagccagcuuauuac

SEQ ID NO: 15406 - RNA, 22 nt, Artificial Sequence
  SAMD9 targeting guide sequence portion
uucuuacuaagcagaucaucaa

SEQ ID NO: 15407 - RNA, 22 nt, Artificial Sequence
  SAMD9 targeting guide sequence portion
uucuucaauccaugccugguaa

SEQ ID NO: 15408 - RNA, 22 nt, Artificial Sequence
  SAMD9 targeting guide sequence portion
uucuuccuccaagaauuugauc

SEQ ID NO: 15409 - RNA, 22 nt, Artificial Sequence
  SAMD9 targeting guide sequence portion
uugaagaagauugucuacucaa

SEQ ID NO: 15410 - RNA, 22 nt, Artificial Sequence
  SAMD9 targeting guide sequence portion
uugagaaauauuuucccagaca

SEQ ID NO: 15411 - RNA, 22 nt, Artificial Sequence
  SAMD9 targeting guide sequence portion
uugagagguuuuugcugucuuu

SEQ ID NO: 15412 - RNA, 22 nt, Artificial Sequence
  SAMD9 targeting guide sequence portion
uugaguagacaaucuucuucaa

SEQ ID NO: 15413 - RNA, 22 nt, Artificial Sequence
  SAMD9 targeting guide sequence portion
uugagugccaagcacaugauac

SEQ ID NO: 15414 - RNA, 22 nt, Artificial Sequence
  SAMD9 targeting guide sequence portion
uugaugacaaaauaauaaggag

SEQ ID NO: 15415 - RNA, 22 nt, Artificial Sequence
  SAMD9 targeting guide sequence portion
uugaugaucugcuuaguaagaa

SEQ ID NO: 15416 - RNA, 22 nt, Artificial Sequence
  SAMD9 targeting guide sequence portion
uugccgguuuaaagcauagauc

SEQ ID NO: 15417 - RNA, 22 nt, Artificial Sequence
  SAMD9 targeting guide sequence portion
uugcuacuuuucauauaucuca

SEQ ID NO: 15418 - RNA, 22 nt, Artificial Sequence
  SAMD9 targeting guide sequence portion
uugcuccucaguuugagagguu

SEQ ID NO: 15419 - RNA, 22 nt, Artificial Sequence
  SAMD9 targeting guide sequence portion
uugcugucuuugagaaauauuu

SEQ ID NO: 15420 - RNA, 22 nt, Artificial Sequence
  SAMD9 targeting guide sequence portion
uuggaagauccuugagugccaa

SEQ ID NO: 15421 - RNA, 22 nt, Artificial Sequence
  SAMD9 targeting guide sequence portion
uuggacucaagaucuaugcuuu

SEQ ID NO: 15422 - RNA, 22 nt, Artificial Sequence
  SAMD9 targeting guide sequence portion
uuggcacucaaggaucuuccaa

SEQ ID NO: 15423 - RNA, 22 nt, Artificial Sequence
  SAMD9 targeting guide sequence portion
uugguuaacaucauugaugaca

SEQ ID NO: 15424 - RNA, 22 nt, Artificial Sequence
  SAMD9 targeting guide sequence portion
uugguuugguuaacaucauuga

SEQ ID NO: 15425 - RNA, 22 nt, Artificial Sequence
  SAMD9 targeting guide sequence portion
uuguagaacucauaacauguuu

SEQ ID NO: 15426 - RNA, 22 nt, Artificial Sequence
  SAMD9 targeting guide sequence portion
uugucaucaaugauguuaacca

SEQ ID NO: 15427 - RNA, 22 nt, Artificial Sequence
  SAMD9 targeting guide sequence portion
uugucuacucaaauggcauuua

SEQ ID NO: 15428 - RNA, 22 nt, Artificial Sequence
  SAMD9 targeting guide sequence portion
uugucuuuguagaacucauaac

SEQ ID NO: 15429 - RNA, 22 nt, Artificial Sequence
  SAMD9 targeting guide sequence portion
uuuaaaccggcaagguuauaga

SEQ ID NO: 15430 - RNA, 22 nt, Artificial Sequence
  SAMD9 targeting guide sequence portion
uuuaaagcauagaucuugaguc

SEQ ID NO: 15431 - RNA, 22 nt, Artificial Sequence
  SAMD9 targeting guide sequence portion
uuuaagaggaaauuaaauacug

SEQ ID NO: 15432 - RNA, 22 nt, Artificial Sequence
  SAMD9 targeting guide sequence portion
uuuaauuuccucuuaaacaugu

SEQ ID NO: 15433 - RNA, 22 nt, Artificial Sequence
  SAMD9 targeting guide sequence portion
uuuagacauuagaaugucuggg

SEQ ID NO: 15434 - RNA, 22 nt, Artificial Sequence
  SAMD9 targeting guide sequence portion
uuuauucuuacuaagcagauca

SEQ ID NO: 15435 - RNA, 22 nt, Artificial Sequence
  SAMD9 targeting guide sequence portion
uuucacuauugucuuuguagaa

SEQ ID NO: 15436 - RNA, 22 nt, Artificial Sequence
  SAMD9 targeting guide sequence portion
uuucauauaucucacuccuucc

SEQ ID NO: 15437 - RNA, 22 nt, Artificial Sequence
  SAMD9 targeting guide sequence portion
uuucccagacauucuaaugucu

SEQ ID NO: 15438 - RNA, 22 nt, Artificial Sequence
  SAMD9 targeting guide sequence portion
uuuccucuuaaacauguuauga

SEQ ID NO: 15439 - RNA, 22 nt, Artificial Sequence
  SAMD9 targeting guide sequence portion
uuucucaaagacagcaaaaacc

SEQ ID NO: 15440 - RNA, 22 nt, Artificial Sequence
  SAMD9 targeting guide sequence portion
uuugagaaauauuuucccagac

SEQ ID NO: 15441 - RNA, 22 nt, Artificial Sequence
  SAMD9 targeting guide sequence portion
uuugagagguuuuugcugucuu

SEQ ID NO: 15442 - RNA, 22 nt, Artificial Sequence
  SAMD9 targeting guide sequence portion
uuugaguagacaaucuucuuca

SEQ ID NO: 15443 - RNA, 22 nt, Artificial Sequence
  SAMD9 targeting guide sequence portion
uuugaucucaguacccauuuaa

SEQ ID NO: 15444 - RNA, 22 nt, Artificial Sequence
  SAMD9 targeting guide sequence portion
uuugcuacuuuucauauaucuc

SEQ ID NO: 15445 - RNA, 22 nt, Artificial Sequence
  SAMD9 targeting guide sequence portion
uuugcugucuuugagaaauauu

SEQ ID NO: 15446 - RNA, 22 nt, Artificial Sequence
  SAMD9 targeting guide sequence portion
uuuggaagauccuugagugcca

SEQ ID NO: 15447 - RNA, 22 nt, Artificial Sequence
  SAMD9 targeting guide sequence portion
uuuggacucaagaucuaugcuu

SEQ ID NO: 15448 - RNA, 22 nt, Artificial Sequence
  SAMD9 targeting guide sequence portion
uuugguuaacaucauugaugac

SEQ ID NO: 15449 - RNA, 22 nt, Artificial Sequence
  SAMD9 targeting guide sequence portion
uuuguagaacucauaacauguu

SEQ ID NO: 15450 - RNA, 22 nt, Artificial Sequence
  SAMD9 targeting guide sequence portion
uuugucaucaaugauguuaacc

SEQ ID NO: 15451 - RNA, 22 nt, Artificial Sequence
  SAMD9 targeting guide sequence portion
uuuucacuauugucuuuguaga

SEQ ID NO: 15452 - RNA, 22 nt, Artificial Sequence
  SAMD9 targeting guide sequence portion
uuuucauauaucucacuccuuc

SEQ ID NO: 15453 - RNA, 22 nt, Artificial Sequence
  SAMD9 targeting guide sequence portion
uuuucccagacauucuaauguc

SEQ ID NO: 15454 - RNA, 22 nt, Artificial Sequence
  SAMD9 targeting guide sequence portion
uuuugcugucuuugagaaauau

SEQ ID NO: 15455 - RNA, 22 nt, Artificial Sequence
  SAMD9 targeting guide sequence portion
uuuuggaagauccuugagugcc

SEQ ID NO: 15456 - RNA, 22 nt, Artificial Sequence
  SAMD9 targeting guide sequence portion
uuuuggacucaagaucuaugcu

SEQ ID NO: 15457 - RNA, 22 nt, Artificial Sequence
  SAMD9 targeting guide sequence portion
uuuugucaucaaugauguuaac

SEQ ID NO: 15458 - RNA, 22 nt, Artificial Sequence
  SAMD9 targeting guide sequence portion
uuuuucacuauugucuuuguag

SEQ ID NO: 15459 - RNA, 22 nt, Artificial Sequence
  SAMD9 targeting guide sequence portion
uuuuugcugucuuugagaaaua

SEQ ID NO: 15460 - RNA, 22 nt, Artificial Sequence
  SAMD9 targeting guide sequence portion
uuuuuggacucaagaucuaugc

SEQ ID NO: 15461 - RNA, 22 nt, Artificial Sequence
  SAMD9 targeting guide sequence portion
uuuuuuggacucaagaucuaug

SEQ ID NO: 15462 - RNA, 20 nt, Artificial Sequence
  SAMD9 targeting guide sequence portion
aaaaaacauaaccauggaau

SEQ ID NO: 15463 - RNA, 20 nt, Artificial Sequence
  SAMD9 targeting guide sequence portion
aaaaaaugugauuuguuucu

SEQ ID NO: 15464 - RNA, 20 nt, Artificial Sequence
  SAMD9 targeting guide sequence portion
aaaaacauaaccauggaauc

SEQ ID NO: 15465 - RNA, 20 nt, Artificial Sequence
  SAMD9 targeting guide sequence portion
aaaaaugugauuuguuucug

SEQ ID NO: 15466 - RNA, 20 nt, Artificial Sequence
  SAMD9 targeting guide sequence portion
aaaaauucuaaugagauuuu

SEQ ID NO: 15467 - RNA, 20 nt, Artificial Sequence
  SAMD9 targeting guide sequence portion
aaaaauuugaacacagacua

SEQ ID NO: 15468 - RNA, 20 nt, Artificial Sequence
  SAMD9 targeting guide sequence portion
aaaacauaaccauggaaucu

SEQ ID NO: 15469 - RNA, 20 nt, Artificial Sequence
  SAMD9 targeting guide sequence portion
aaaagcauaaucaguaagag

SEQ ID NO: 15470 - RNA, 20 nt, Artificial Sequence
  SAMD9 targeting guide sequence portion
aaaaggcaugaacucuuuaa

SEQ ID NO: 15471 - RNA, 20 nt, Artificial Sequence
  SAMD9 targeting guide sequence portion
aaaagugugcugaauuccau

SEQ ID NO: 15472 - RNA, 20 nt, Artificial Sequence
  SAMD9 targeting guide sequence portion
aaaaucaauuauuaggcaau

SEQ ID NO: 15473 - RNA, 20 nt, Artificial Sequence
  SAMD9 targeting guide sequence portion
aaaaucucauuagaauuuuu

SEQ ID NO: 15474 - RNA, 20 nt, Artificial Sequence
  SAMD9 targeting guide sequence portion
aaaaucuuccuccagugaaa

SEQ ID NO: 15475 - RNA, 20 nt, Artificial Sequence
  SAMD9 targeting guide sequence portion
aaaaugugauuuguuucugu

SEQ ID NO: 15476 - RNA, 20 nt, Artificial Sequence
  SAMD9 targeting guide sequence portion
aaaauuacugauucuagauc

SEQ ID NO: 15477 - RNA, 20 nt, Artificial Sequence
  SAMD9 targeting guide sequence portion
aaaauucuaaugagauuuug

SEQ ID NO: 15478 - RNA, 20 nt, Artificial Sequence
  SAMD9 targeting guide sequence portion
aaaauuucaaaagcauaauc

SEQ ID NO: 15479 - RNA, 20 nt, Artificial Sequence
  SAMD9 targeting guide sequence portion
aaaauuugaacacagacuag

SEQ ID NO: 15480 - RNA, 20 nt, Artificial Sequence
  SAMD9 targeting guide sequence portion
aaaauuuuaugcagaagcaa

SEQ ID NO: 15481 - RNA, 20 nt, Artificial Sequence
  SAMD9 targeting guide sequence portion
aaacaagauuaguccugagu

SEQ ID NO: 15482 - RNA, 20 nt, Artificial Sequence
  SAMD9 targeting guide sequence portion
aaacacaaaauuacugauuc

SEQ ID NO: 15483 - RNA, 20 nt, Artificial Sequence
  SAMD9 targeting guide sequence portion
aaacauaaccauggaaucuu

SEQ ID NO: 15484 - RNA, 20 nt, Artificial Sequence
  SAMD9 targeting guide sequence portion
aaagagugagcuuauaaguu

SEQ ID NO: 15485 - RNA, 20 nt, Artificial Sequence
  SAMD9 targeting guide sequence portion
aaagaguucaugccuuuuag

SEQ ID NO: 15486 - RNA, 20 nt, Artificial Sequence
  SAMD9 targeting guide sequence portion
aaagcauaaucaguaagagg

SEQ ID NO: 15487 - RNA, 20 nt, Artificial Sequence
  SAMD9 targeting guide sequence portion
aaaggcaugaacucuuuaaa

SEQ ID NO: 15488 - RNA, 20 nt, Artificial Sequence
  SAMD9 targeting guide sequence portion
aaagggaaguagaaccgaaa

SEQ ID NO: 15489 - RNA, 20 nt, Artificial Sequence
  SAMD9 targeting guide sequence portion
aaaguaacaauaaagaguga

SEQ ID NO: 15490 - RNA, 20 nt, Artificial Sequence
  SAMD9 targeting guide sequence portion
aaagugugcugaauuccaug

SEQ ID NO: 15491 - RNA, 20 nt, Artificial Sequence
  SAMD9 targeting guide sequence portion
aaauaaaugacaugaucuag

SEQ ID NO: 15492 - RNA, 20 nt, Artificial Sequence
  SAMD9 targeting guide sequence portion
aaauaucuagucuguguuca

SEQ ID NO: 15493 - RNA, 20 nt, Artificial Sequence
  SAMD9 targeting guide sequence portion
aaaucaauuauuaggcaauc

SEQ ID NO: 15494 - RNA, 20 nt, Artificial Sequence
  SAMD9 targeting guide sequence portion
aaaucucauuagaauuuuuu

SEQ ID NO: 15495 - RNA, 20 nt, Artificial Sequence
  SAMD9 targeting guide sequence portion
aaaucuuccuccagugaaaa

SEQ ID NO: 15496 - RNA, 20 nt, Artificial Sequence
  SAMD9 targeting guide sequence portion
aaaugacaugaucuagaauc

SEQ ID NO: 15497 - RNA, 20 nt, Artificial Sequence
  SAMD9 targeting guide sequence portion
aaaugugauuuguuucuguc

SEQ ID NO: 15498 - RNA, 20 nt, Artificial Sequence
  SAMD9 targeting guide sequence portion
aaauuacugauucuagauca

SEQ ID NO: 15499 - RNA, 20 nt, Artificial Sequence
  SAMD9 targeting guide sequence portion
aaauucuaaugagauuuuga

SEQ ID NO: 15500 - RNA, 20 nt, Artificial Sequence
  SAMD9 targeting guide sequence portion
aaauuucaaaagcauaauca

SEQ ID NO: 15501 - RNA, 20 nt, Artificial Sequence
  SAMD9 targeting guide sequence portion
aaauuugaacacagacuaga

SEQ ID NO: 15502 - RNA, 20 nt, Artificial Sequence
  SAMD9 targeting guide sequence portion
aaauuuuaacuccauaacuu

SEQ ID NO: 15503 - RNA, 20 nt, Artificial Sequence
  SAMD9 targeting guide sequence portion
aaauuuuaugcagaagcaag

SEQ ID NO: 15504 - RNA, 20 nt, Artificial Sequence
  SAMD9 targeting guide sequence portion
aaauuuuucugauugccuaa

SEQ ID NO: 15505 - RNA, 20 nt, Artificial Sequence
  SAMD9 targeting guide sequence portion
aacaagauuaguccugaguu

SEQ ID NO: 15506 - RNA, 20 nt, Artificial Sequence
  SAMD9 targeting guide sequence portion
aacaauaaagagugagcuua

SEQ ID NO: 15507 - RNA, 20 nt, Artificial Sequence
  SAMD9 targeting guide sequence portion
aacaauggcugcaagcugga

SEQ ID NO: 15508 - RNA, 20 nt, Artificial Sequence
  SAMD9 targeting guide sequence portion
aacacaaaauuacugauucu

SEQ ID NO: 15509 - RNA, 20 nt, Artificial Sequence
  SAMD9 targeting guide sequence portion
aacacagacuagauauuuga

SEQ ID NO: 15510 - RNA, 20 nt, Artificial Sequence
  SAMD9 targeting guide sequence portion
aacauaaccauggaaucuuc

SEQ ID NO: 15511 - RNA, 20 nt, Artificial Sequence
  SAMD9 targeting guide sequence portion
aaccauggaaucuucaauaa

SEQ ID NO: 15512 - RNA, 20 nt, Artificial Sequence
  SAMD9 targeting guide sequence portion
aaccgaaacaagauuagucc

SEQ ID NO: 15513 - RNA, 20 nt, Artificial Sequence
  SAMD9 targeting guide sequence portion
aacucaggacuaaucuuguu

SEQ ID NO: 15514 - RNA, 20 nt, Artificial Sequence
  SAMD9 targeting guide sequence portion
aacuccauaacuuauaagcu

SEQ ID NO: 15515 - RNA, 20 nt, Artificial Sequence
  SAMD9 targeting guide sequence portion
aacucuuuaaaaaacauaac

SEQ ID NO: 15516 - RNA, 20 nt, Artificial Sequence
  SAMD9 targeting guide sequence portion
aacuuauaagcucacucuuu

SEQ ID NO: 15517 - RNA, 20 nt, Artificial Sequence
  SAMD9 targeting guide sequence portion
aagagaaaauuucaaaagca

SEQ ID NO: 15518 - RNA, 20 nt, Artificial Sequence
  SAMD9 targeting guide sequence portion
aagagggagaaaagugugcu

SEQ ID NO: 15519 - RNA, 20 nt, Artificial Sequence
  SAMD9 targeting guide sequence portion
aagagugagcuuauaaguua

SEQ ID NO: 15520 - RNA, 20 nt, Artificial Sequence
  SAMD9 targeting guide sequence portion
aagaguucaugccuuuuaga

SEQ ID NO: 15521 - RNA, 20 nt, Artificial Sequence
  SAMD9 targeting guide sequence portion
aagauuaguccugaguuaac

SEQ ID NO: 15522 - RNA, 20 nt, Artificial Sequence
  SAMD9 targeting guide sequence portion
aagauuccaugguuauguuu

SEQ ID NO: 15523 - RNA, 20 nt, Artificial Sequence
  SAMD9 targeting guide sequence portion
aagauuuucccuugcuucug

SEQ ID NO: 15524 - RNA, 20 nt, Artificial Sequence
  SAMD9 targeting guide sequence portion
aagcaagggaaaaucuuccu

SEQ ID NO: 15525 - RNA, 20 nt, Artificial Sequence
  SAMD9 targeting guide sequence portion
aagcauaaucaguaagaggg

SEQ ID NO: 15526 - RNA, 20 nt, Artificial Sequence
  SAMD9 targeting guide sequence portion
aagcucacucuuuauuguua

SEQ ID NO: 15527 - RNA, 20 nt, Artificial Sequence
  SAMD9 targeting guide sequence portion
aagcuggauacauggaauuc

SEQ ID NO: 15528 - RNA, 20 nt, Artificial Sequence
  SAMD9 targeting guide sequence portion
aaggcaugaacucuuuaaaa

SEQ ID NO: 15529 - RNA, 20 nt, Artificial Sequence
  SAMD9 targeting guide sequence portion
aagggaaaaucuuccuccag

SEQ ID NO: 15530 - RNA, 20 nt, Artificial Sequence
  SAMD9 targeting guide sequence portion
aagggaaguagaaccgaaac

SEQ ID NO: 15531 - RNA, 20 nt, Artificial Sequence
  SAMD9 targeting guide sequence portion
aagguacuauauuauugaag

SEQ ID NO: 15532 - RNA, 20 nt, Artificial Sequence
  SAMD9 targeting guide sequence portion
aaguaacaauaaagagugag

SEQ ID NO: 15533 - RNA, 20 nt, Artificial Sequence
  SAMD9 targeting guide sequence portion
aaguagaaccgaaacaagau

SEQ ID NO: 15534 - RNA, 20 nt, Artificial Sequence
  SAMD9 targeting guide sequence portion
aagugugcugaauuccaugu

SEQ ID NO: 15535 - RNA, 20 nt, Artificial Sequence
  SAMD9 targeting guide sequence portion
aaguuauggaguuaaaauuu

SEQ ID NO: 15536 - RNA, 20 nt, Artificial Sequence
  SAMD9 targeting guide sequence portion
aauaaagagugagcuuauaa

SEQ ID NO: 15537 - RNA, 20 nt, Artificial Sequence
  SAMD9 targeting guide sequence portion
aauaaaugacaugaucuaga

SEQ ID NO: 15538 - RNA, 20 nt, Artificial Sequence
  SAMD9 targeting guide sequence portion
aauaauauaguaccuuaaua

SEQ ID NO: 15539 - RNA, 20 nt, Artificial Sequence
  SAMD9 targeting guide sequence portion
aauacuuuaguauguaucuc

SEQ ID NO: 15540 - RNA, 20 nt, Artificial Sequence
  SAMD9 targeting guide sequence portion
aauauaguaccuuaauaucc

SEQ ID NO: 15541 - RNA, 20 nt, Artificial Sequence
  SAMD9 targeting guide sequence portion
aauauccucaaauaucuagu

SEQ ID NO: 15542 - RNA, 20 nt, Artificial Sequence
  SAMD9 targeting guide sequence portion
aauaucuagucuguguucaa

SEQ ID NO: 15543 - RNA, 20 nt, Artificial Sequence
  SAMD9 targeting guide sequence portion
aaucaauuauuaggcaauca

SEQ ID NO: 15544 - RNA, 20 nt, Artificial Sequence
  SAMD9 targeting guide sequence portion
aaucagaaaaauuugaacac

SEQ ID NO: 15545 - RNA, 20 nt, Artificial Sequence
  SAMD9 targeting guide sequence portion
aaucaguaagagggagaaaa

SEQ ID NO: 15546 - RNA, 20 nt, Artificial Sequence
  SAMD9 targeting guide sequence portion
aaucaguaauuuuguguuug

SEQ ID NO: 15547 - RNA, 20 nt, Artificial Sequence
  SAMD9 targeting guide sequence portion
aaucuaaaaucaauuauuag

SEQ ID NO: 15548 - RNA, 20 nt, Artificial Sequence
  SAMD9 targeting guide sequence portion
aaucucauuagaauuuuuuc

SEQ ID NO: 15549 - RNA, 20 nt, Artificial Sequence
  SAMD9 targeting guide sequence portion
aaucuuccuccagugaaaaa

SEQ ID NO: 15550 - RNA, 20 nt, Artificial Sequence
  SAMD9 targeting guide sequence portion
aaucuuguuucgguucuacu

SEQ ID NO: 15551 - RNA, 20 nt, Artificial Sequence
  SAMD9 targeting guide sequence portion
aaugacaugaucuagaauca

SEQ ID NO: 15552 - RNA, 20 nt, Artificial Sequence
  SAMD9 targeting guide sequence portion
aaugagauuuugaagacaga

SEQ ID NO: 15553 - RNA, 20 nt, Artificial Sequence
  SAMD9 targeting guide sequence portion
aauggcugcaagcuggauac

SEQ ID NO: 15554 - RNA, 20 nt, Artificial Sequence
  SAMD9 targeting guide sequence portion
aaugugauuuguuucugucu

SEQ ID NO: 15555 - RNA, 20 nt, Artificial Sequence
  SAMD9 targeting guide sequence portion
aauuacugauucuagaucau

SEQ ID NO: 15556 - RNA, 20 nt, Artificial Sequence
  SAMD9 targeting guide sequence portion
aauuagaaaguaacaauaaa

SEQ ID NO: 15557 - RNA, 20 nt, Artificial Sequence
  SAMD9 targeting guide sequence portion
aauuauuaggcaaucagaaa

SEQ ID NO: 15558 - RNA, 20 nt, Artificial Sequence
  SAMD9 targeting guide sequence portion
aauucagcacacuuuucucc

SEQ ID NO: 15559 - RNA, 20 nt, Artificial Sequence
  SAMD9 targeting guide sequence portion
aauuccauguauccagcuug

SEQ ID NO: 15560 - RNA, 20 nt, Artificial Sequence
  SAMD9 targeting guide sequence portion
aauucuaaugagauuuugaa

SEQ ID NO: 15561 - RNA, 20 nt, Artificial Sequence
  SAMD9 targeting guide sequence portion
aauuucaaaagcauaaucag

SEQ ID NO: 15562 - RNA, 20 nt, Artificial Sequence
  SAMD9 targeting guide sequence portion
aauuugaacacagacuagau

SEQ ID NO: 15563 - RNA, 20 nt, Artificial Sequence
  SAMD9 targeting guide sequence portion
aauuuuaacuccauaacuua

SEQ ID NO: 15564 - RNA, 20 nt, Artificial Sequence
  SAMD9 targeting guide sequence portion
aauuuuaugcagaagcaagg

SEQ ID NO: 15565 - RNA, 20 nt, Artificial Sequence
  SAMD9 targeting guide sequence portion
aauuuuguguuuggggugug

SEQ ID NO: 15566 - RNA, 20 nt, Artificial Sequence
  SAMD9 targeting guide sequence portion
aauuuuucugauugccuaau

SEQ ID NO: 15567 - RNA, 20 nt, Artificial Sequence
  SAMD9 targeting guide sequence portion
aauuuuuucacuggaggaag

SEQ ID NO: 15568 - RNA, 20 nt, Artificial Sequence
  SAMD9 targeting guide sequence portion
acaaaauuacugauucuaga

SEQ ID NO: 15569 - RNA, 20 nt, Artificial Sequence
  SAMD9 targeting guide sequence portion
acaaauacuuuaguauguau

SEQ ID NO: 15570 - RNA, 20 nt, Artificial Sequence
  SAMD9 targeting guide sequence portion
acaagagaaaauuucaaaag

SEQ ID NO: 15571 - RNA, 20 nt, Artificial Sequence
  SAMD9 targeting guide sequence portion
acaagauuaguccugaguua

SEQ ID NO: 15572 - RNA, 20 nt, Artificial Sequence
  SAMD9 targeting guide sequence portion
acaauaaagagugagcuuau

SEQ ID NO: 15573 - RNA, 20 nt, Artificial Sequence
  SAMD9 targeting guide sequence portion
acaauggcugcaagcuggau

SEQ ID NO: 15574 - RNA, 20 nt, Artificial Sequence
  SAMD9 targeting guide sequence portion
acacaaaauuacugauucua

SEQ ID NO: 15575 - RNA, 20 nt, Artificial Sequence
  SAMD9 targeting guide sequence portion
acacagacuagauauuugag

SEQ ID NO: 15576 - RNA, 20 nt, Artificial Sequence
  SAMD9 targeting guide sequence portion
acaccccaaacacaaaauua

SEQ ID NO: 15577 - RNA, 20 nt, Artificial Sequence
  SAMD9 targeting guide sequence portion
acacuuuucucccucuuacu

SEQ ID NO: 15578 - RNA, 20 nt, Artificial Sequence
  SAMD9 targeting guide sequence portion
acagacuagauauuugagga

SEQ ID NO: 15579 - RNA, 20 nt, Artificial Sequence
  SAMD9 targeting guide sequence portion
acauaaccauggaaucuuca

SEQ ID NO: 15580 - RNA, 20 nt, Artificial Sequence
  SAMD9 targeting guide sequence portion
acaugaucuagaaucaguaa

SEQ ID NO: 15581 - RNA, 20 nt, Artificial Sequence
  SAMD9 targeting guide sequence portion
acauggaauucagcacacuu

SEQ ID NO: 15582 - RNA, 20 nt, Artificial Sequence
  SAMD9 targeting guide sequence portion
accacccccacaccccaaac

SEQ ID NO: 15583 - RNA, 20 nt, Artificial Sequence
  SAMD9 targeting guide sequence portion
accauggaaucuucaauaau

SEQ ID NO: 15584 - RNA, 20 nt, Artificial Sequence
  SAMD9 targeting guide sequence portion
accccaaacacaaaauuacu

SEQ ID NO: 15585 - RNA, 20 nt, Artificial Sequence
  SAMD9 targeting guide sequence portion
acccccacaccccaaacaca

SEQ ID NO: 15586 - RNA, 20 nt, Artificial Sequence
  SAMD9 targeting guide sequence portion
accgaaacaagauuaguccu

SEQ ID NO: 15587 - RNA, 20 nt, Artificial Sequence
  SAMD9 targeting guide sequence portion
accuuaauauccucaaauau

SEQ ID NO: 15588 - RNA, 20 nt, Artificial Sequence
  SAMD9 targeting guide sequence portion
acuaaucuuguuucgguucu

SEQ ID NO: 15589 - RNA, 20 nt, Artificial Sequence
  SAMD9 targeting guide sequence portion
acuagauauuugaggauauu

SEQ ID NO: 15590 - RNA, 20 nt, Artificial Sequence
  SAMD9 targeting guide sequence portion
acuauauuauugaagauucc

SEQ ID NO: 15591 - RNA, 20 nt, Artificial Sequence
  SAMD9 targeting guide sequence portion
acucaggacuaaucuuguuu

SEQ ID NO: 15592 - RNA, 20 nt, Artificial Sequence
  SAMD9 targeting guide sequence portion
acuccauaacuuauaagcuc

SEQ ID NO: 15593 - RNA, 20 nt, Artificial Sequence
  SAMD9 targeting guide sequence portion
acucuuuaaaaaacauaacc

SEQ ID NO: 15594 - RNA, 20 nt, Artificial Sequence
  SAMD9 targeting guide sequence portion
acucuuuauuguuacuuucu

SEQ ID NO: 15595 - RNA, 20 nt, Artificial Sequence
  SAMD9 targeting guide sequence portion
acugauuaugcuuuugaaau

SEQ ID NO: 15596 - RNA, 20 nt, Artificial Sequence
  SAMD9 targeting guide sequence portion
acugauucuagaucauguca

SEQ ID NO: 15597 - RNA, 20 nt, Artificial Sequence
  SAMD9 targeting guide sequence portion
acuggaggaagauuuucccu

SEQ ID NO: 15598 - RNA, 20 nt, Artificial Sequence
  SAMD9 targeting guide sequence portion
acuuauaagcucacucuuua

SEQ ID NO: 15599 - RNA, 20 nt, Artificial Sequence
  SAMD9 targeting guide sequence portion
acuucccuuucaccaccccc

SEQ ID NO: 15600 - RNA, 20 nt, Artificial Sequence
  SAMD9 targeting guide sequence portion
acuuuaguauguaucucuaa

SEQ ID NO: 15601 - RNA, 20 nt, Artificial Sequence
  SAMD9 targeting guide sequence portion
acuuuucucccucuuacuga

SEQ ID NO: 15602 - RNA, 20 nt, Artificial Sequence
  SAMD9 targeting guide sequence portion
agaaaaauuugaacacagac

SEQ ID NO: 15603 - RNA, 20 nt, Artificial Sequence
  SAMD9 targeting guide sequence portion
agaaaagugugcugaauucc

SEQ ID NO: 15604 - RNA, 20 nt, Artificial Sequence
  SAMD9 targeting guide sequence portion
agaaaauuucaaaagcauaa

SEQ ID NO: 15605 - RNA, 20 nt, Artificial Sequence
  SAMD9 targeting guide sequence portion
agaaaguaacaauaaagagu

SEQ ID NO: 15606 - RNA, 20 nt, Artificial Sequence
  SAMD9 targeting guide sequence portion
agaaccgaaacaagauuagu

SEQ ID NO: 15607 - RNA, 20 nt, Artificial Sequence
  SAMD9 targeting guide sequence portion
agaagcaagggaaaaucuuc

SEQ ID NO: 15608 - RNA, 20 nt, Artificial Sequence
  SAMD9 targeting guide sequence portion
agaaucaguaauuuuguguu

SEQ ID NO: 15609 - RNA, 20 nt, Artificial Sequence
  SAMD9 targeting guide sequence portion
agaauuuuuucacuggagga

SEQ ID NO: 15610 - RNA, 20 nt, Artificial Sequence
  SAMD9 targeting guide sequence portion
agacuagauauuugaggaua

SEQ ID NO: 15611 - RNA, 20 nt, Artificial Sequence
  SAMD9 targeting guide sequence portion
agagaaaauuucaaaagcau

SEQ ID NO: 15612 - RNA, 20 nt, Artificial Sequence
  SAMD9 targeting guide sequence portion
agagauacauacuaaaguau

SEQ ID NO: 15613 - RNA, 20 nt, Artificial Sequence
  SAMD9 targeting guide sequence portion
agagggagaaaagugugcug

SEQ ID NO: 15614 - RNA, 20 nt, Artificial Sequence
  SAMD9 targeting guide sequence portion
agagugagcuuauaaguuau

SEQ ID NO: 15615 - RNA, 20 nt, Artificial Sequence
  SAMD9 targeting guide sequence portion
agaguucaugccuuuuagag

SEQ ID NO: 15616 - RNA, 20 nt, Artificial Sequence
  SAMD9 targeting guide sequence portion
agauauuugaggauauuaag

SEQ ID NO: 15617 - RNA, 20 nt, Artificial Sequence
  SAMD9 targeting guide sequence portion
agaucaugucauuuauuuac

SEQ ID NO: 15618 - RNA, 20 nt, Artificial Sequence
  SAMD9 targeting guide sequence portion
agauuaguccugaguuaaca

SEQ ID NO: 15619 - RNA, 20 nt, Artificial Sequence
  SAMD9 targeting guide sequence portion
agauuccaugguuauguuuu

SEQ ID NO: 15620 - RNA, 20 nt, Artificial Sequence
  SAMD9 targeting guide sequence portion
agauuuucccuugcuucugc

SEQ ID NO: 15621 - RNA, 20 nt, Artificial Sequence
  SAMD9 targeting guide sequence portion
agauuuugaagacagaaaca

SEQ ID NO: 15622 - RNA, 20 nt, Artificial Sequence
  SAMD9 targeting guide sequence portion
agcaagggaaaaucuuccuc

SEQ ID NO: 15623 - RNA, 20 nt, Artificial Sequence
  SAMD9 targeting guide sequence portion
agcacacuuuucucccucuu

SEQ ID NO: 15624 - RNA, 20 nt, Artificial Sequence
  SAMD9 targeting guide sequence portion
agcauaaucaguaagaggga

SEQ ID NO: 15625 - RNA, 20 nt, Artificial Sequence
  SAMD9 targeting guide sequence portion
agccauuguuaacucaggac

SEQ ID NO: 15626 - RNA, 20 nt, Artificial Sequence
  SAMD9 targeting guide sequence portion
agcucacucuuuauuguuac

SEQ ID NO: 15627 - RNA, 20 nt, Artificial Sequence
  SAMD9 targeting guide sequence portion
agcuggauacauggaauuca

SEQ ID NO: 15628 - RNA, 20 nt, Artificial Sequence
  SAMD9 targeting guide sequence portion
agcuuauaaguuauggaguu

SEQ ID NO: 15629 - RNA, 20 nt, Artificial Sequence
  SAMD9 targeting guide sequence portion
agcuugcagccauuguuaac

SEQ ID NO: 15630 - RNA, 20 nt, Artificial Sequence
  SAMD9 targeting guide sequence portion
aggaagauuuucccuugcuu

SEQ ID NO: 15631 - RNA, 20 nt, Artificial Sequence
  SAMD9 targeting guide sequence portion
aggacuaaucuuguuucggu

SEQ ID NO: 15632 - RNA, 20 nt, Artificial Sequence
  SAMD9 targeting guide sequence portion
aggauauuaagguacuauau

SEQ ID NO: 15633 - RNA, 20 nt, Artificial Sequence
  SAMD9 targeting guide sequence portion
aggcaaucagaaaaauuuga

SEQ ID NO: 15634 - RNA, 20 nt, Artificial Sequence
  SAMD9 targeting guide sequence portion
aggcaugaacucuuuaaaaa

SEQ ID NO: 15635 - RNA, 20 nt, Artificial Sequence
  SAMD9 targeting guide sequence portion
agggaaaaucuuccuccagu

SEQ ID NO: 15636 - RNA, 20 nt, Artificial Sequence
  SAMD9 targeting guide sequence portion
agggaaguagaaccgaaaca

SEQ ID NO: 15637 - RNA, 20 nt, Artificial Sequence
  SAMD9 targeting guide sequence portion
agggagaaaagugugcugaa

SEQ ID NO: 15638 - RNA, 20 nt, Artificial Sequence
  SAMD9 targeting guide sequence portion
agguacuauauuauugaaga

SEQ ID NO: 15639 - RNA, 20 nt, Artificial Sequence
  SAMD9 targeting guide sequence portion
aguaacaauaaagagugagc

SEQ ID NO: 15640 - RNA, 20 nt, Artificial Sequence
  SAMD9 targeting guide sequence portion
aguaagagggagaaaagugu

SEQ ID NO: 15641 - RNA, 20 nt, Artificial Sequence
  SAMD9 targeting guide sequence portion
aguaauuuuguguuuggggu

SEQ ID NO: 15642 - RNA, 20 nt, Artificial Sequence
  SAMD9 targeting guide sequence portion
aguaccuuaauauccucaaa

SEQ ID NO: 15643 - RNA, 20 nt, Artificial Sequence
  SAMD9 targeting guide sequence portion
aguagaaccgaaacaagauu

SEQ ID NO: 15644 - RNA, 20 nt, Artificial Sequence
  SAMD9 targeting guide sequence portion
aguauguaucucuaaaaggc

SEQ ID NO: 15645 - RNA, 20 nt, Artificial Sequence
  SAMD9 targeting guide sequence portion
aguauuuguaaauaaaugac

SEQ ID NO: 15646 - RNA, 20 nt, Artificial Sequence
  SAMD9 targeting guide sequence portion
aguccugaguuaacaauggc

SEQ ID NO: 15647 - RNA, 20 nt, Artificial Sequence
  SAMD9 targeting guide sequence portion
agucuguguucaaauuuuuc

SEQ ID NO: 15648 - RNA, 20 nt, Artificial Sequence
  SAMD9 targeting guide sequence portion
agugaaaaaauucuaaugag

SEQ ID NO: 15649 - RNA, 20 nt, Artificial Sequence
  SAMD9 targeting guide sequence portion
agugagcuuauaaguuaugg

SEQ ID NO: 15650 - RNA, 20 nt, Artificial Sequence
  SAMD9 targeting guide sequence portion
agugugcugaauuccaugua

SEQ ID NO: 15651 - RNA, 20 nt, Artificial Sequence
  SAMD9 targeting guide sequence portion
aguuaaaauuuuaugcagaa

SEQ ID NO: 15652 - RNA, 20 nt, Artificial Sequence
  SAMD9 targeting guide sequence portion
aguuaacaauggcugcaagc

SEQ ID NO: 15653 - RNA, 20 nt, Artificial Sequence
  SAMD9 targeting guide sequence portion
aguuauggaguuaaaauuuu

SEQ ID NO: 15654 - RNA, 20 nt, Artificial Sequence
  SAMD9 targeting guide sequence portion
aguucaugccuuuuagagau

SEQ ID NO: 15655 - RNA, 20 nt, Artificial Sequence
  SAMD9 targeting guide sequence portion
auaaagagugagcuuauaag

SEQ ID NO: 15656 - RNA, 20 nt, Artificial Sequence
  SAMD9 targeting guide sequence portion
auaaaugacaugaucuagaa

SEQ ID NO: 15657 - RNA, 20 nt, Artificial Sequence
  SAMD9 targeting guide sequence portion
auaaccauggaaucuucaau

SEQ ID NO: 15658 - RNA, 20 nt, Artificial Sequence
  SAMD9 targeting guide sequence portion
auaacuuauaagcucacucu

SEQ ID NO: 15659 - RNA, 20 nt, Artificial Sequence
  SAMD9 targeting guide sequence portion
auaagcucacucuuuauugu

SEQ ID NO: 15660 - RNA, 20 nt, Artificial Sequence
  SAMD9 targeting guide sequence portion
auaauauaguaccuuaauau

SEQ ID NO: 15661 - RNA, 20 nt, Artificial Sequence
  SAMD9 targeting guide sequence portion
auaaucaguaagagggagaa

SEQ ID NO: 15662 - RNA, 20 nt, Artificial Sequence
  SAMD9 targeting guide sequence portion
auacauggaauucagcacac

SEQ ID NO: 15663 - RNA, 20 nt, Artificial Sequence
  SAMD9 targeting guide sequence portion
auacuuuaguauguaucucu

SEQ ID NO: 15664 - RNA, 20 nt, Artificial Sequence
  SAMD9 targeting guide sequence portion
auaguaccuuaauauccuca

SEQ ID NO: 15665 - RNA, 20 nt, Artificial Sequence
  SAMD9 targeting guide sequence portion
auauaguaccuuaauauccu

SEQ ID NO: 15666 - RNA, 20 nt, Artificial Sequence
  SAMD9 targeting guide sequence portion
auauccucaaauaucuaguc

SEQ ID NO: 15667 - RNA, 20 nt, Artificial Sequence
  SAMD9 targeting guide sequence portion
auaucuagucuguguucaaa

SEQ ID NO: 15668 - RNA, 20 nt, Artificial Sequence
  SAMD9 targeting guide sequence portion
auauuauugaagauuccaug

SEQ ID NO: 15669 - RNA, 20 nt, Artificial Sequence
  SAMD9 targeting guide sequence portion
auauuugaggauauuaaggu

SEQ ID NO: 15670 - RNA, 20 nt, Artificial Sequence
  SAMD9 targeting guide sequence portion
aucaauuauuaggcaaucag

SEQ ID NO: 15671 - RNA, 20 nt, Artificial Sequence
  SAMD9 targeting guide sequence portion
aucagaaaaauuugaacaca

SEQ ID NO: 15672 - RNA, 20 nt, Artificial Sequence
  SAMD9 targeting guide sequence portion
aucaguaagagggagaaaag

SEQ ID NO: 15673 - RNA, 20 nt, Artificial Sequence
  SAMD9 targeting guide sequence portion
aucaguaauuuuguguuugg

SEQ ID NO: 15674 - RNA, 20 nt, Artificial Sequence
  SAMD9 targeting guide sequence portion
auccagcuugcagccauugu

SEQ ID NO: 15675 - RNA, 20 nt, Artificial Sequence
  SAMD9 targeting guide sequence portion
auccucaaauaucuagucug

SEQ ID NO: 15676 - RNA, 20 nt, Artificial Sequence
  SAMD9 targeting guide sequence portion
aucuaaaaucaauuauuagg

SEQ ID NO: 15677 - RNA, 20 nt, Artificial Sequence
  SAMD9 targeting guide sequence portion
aucuagaaucaguaauuuug

SEQ ID NO: 15678 - RNA, 20 nt, Artificial Sequence
  SAMD9 targeting guide sequence portion
aucuagucuguguucaaauu

SEQ ID NO: 15679 - RNA, 20 nt, Artificial Sequence
  SAMD9 targeting guide sequence portion
aucucauuagaauuuuuuca

SEQ ID NO: 15680 - RNA, 20 nt, Artificial Sequence
  SAMD9 targeting guide sequence portion
aucucuaaaaggcaugaacu

SEQ ID NO: 15681 - RNA, 20 nt, Artificial Sequence
  SAMD9 targeting guide sequence portion
aucuuccuccagugaaaaaa

SEQ ID NO: 15682 - RNA, 20 nt, Artificial Sequence
  SAMD9 targeting guide sequence portion
aucuuguuucgguucuacuu

SEQ ID NO: 15683 - RNA, 20 nt, Artificial Sequence
  SAMD9 targeting guide sequence portion
augaacucuuuaaaaaacau

SEQ ID NO: 15684 - RNA, 20 nt, Artificial Sequence
  SAMD9 targeting guide sequence portion
augacaugaucuagaaucag

SEQ ID NO: 15685 - RNA, 20 nt, Artificial Sequence
  SAMD9 targeting guide sequence portion
augagauuuugaagacagaa

SEQ ID NO: 15686 - RNA, 20 nt, Artificial Sequence
  SAMD9 targeting guide sequence portion
augaucuagaaucaguaauu

SEQ ID NO: 15687 - RNA, 20 nt, Artificial Sequence
  SAMD9 targeting guide sequence portion
augcagaagcaagggaaaau

SEQ ID NO: 15688 - RNA, 20 nt, Artificial Sequence
  SAMD9 targeting guide sequence portion
augccuuuuagagauacaua

SEQ ID NO: 15689 - RNA, 20 nt, Artificial Sequence
  SAMD9 targeting guide sequence portion
augcuuuugaaauuuucucu

SEQ ID NO: 15690 - RNA, 20 nt, Artificial Sequence
  SAMD9 targeting guide sequence portion
auggaaucuucaauaauaua

SEQ ID NO: 15691 - RNA, 20 nt, Artificial Sequence
  SAMD9 targeting guide sequence portion
auggaauucagcacacuuuu

SEQ ID NO: 15692 - RNA, 20 nt, Artificial Sequence
  SAMD9 targeting guide sequence portion
auggaguuaaaauuuuaugc

SEQ ID NO: 15693 - RNA, 20 nt, Artificial Sequence
  SAMD9 targeting guide sequence portion
auggcugcaagcuggauaca

SEQ ID NO: 15694 - RNA, 20 nt, Artificial Sequence
  SAMD9 targeting guide sequence portion
augguuauguuuuuuaaaga

SEQ ID NO: 15695 - RNA, 20 nt, Artificial Sequence
  SAMD9 targeting guide sequence portion
auguauccagcuugcagcca

SEQ ID NO: 15696 - RNA, 20 nt, Artificial Sequence
  SAMD9 targeting guide sequence portion
auguaucucuaaaaggcaug

SEQ ID NO: 15697 - RNA, 20 nt, Artificial Sequence
  SAMD9 targeting guide sequence portion
augugauuuguuucugucuu

SEQ ID NO: 15698 - RNA, 20 nt, Artificial Sequence
  SAMD9 targeting guide sequence portion
auguuuuuuaaagaguucau

SEQ ID NO: 15699 - RNA, 20 nt, Artificial Sequence
  SAMD9 targeting guide sequence portion
auuacugauucuagaucaug

SEQ ID NO: 15700 - RNA, 20 nt, Artificial Sequence
  SAMD9 targeting guide sequence portion
auuagaaaguaacaauaaag

SEQ ID NO: 15701 - RNA, 20 nt, Artificial Sequence
  SAMD9 targeting guide sequence portion
auuagaauuuuuucacugga

SEQ ID NO: 15702 - RNA, 20 nt, Artificial Sequence
  SAMD9 targeting guide sequence portion
auuaggcaaucagaaaaauu

SEQ ID NO: 15703 - RNA, 20 nt, Artificial Sequence
  SAMD9 targeting guide sequence portion
auuaguccugaguuaacaau

SEQ ID NO: 15704 - RNA, 20 nt, Artificial Sequence
  SAMD9 targeting guide sequence portion
auuaugcuuuugaaauuuuc

SEQ ID NO: 15705 - RNA, 20 nt, Artificial Sequence
  SAMD9 targeting guide sequence portion
auuauuaggcaaucagaaaa

SEQ ID NO: 15706 - RNA, 20 nt, Artificial Sequence
  SAMD9 targeting guide sequence portion
auuauugaagauuccauggu

SEQ ID NO: 15707 - RNA, 20 nt, Artificial Sequence
  SAMD9 targeting guide sequence portion
auucagcacacuuuucuccc

SEQ ID NO: 15708 - RNA, 20 nt, Artificial Sequence
  SAMD9 targeting guide sequence portion
auuccaugguuauguuuuuu

SEQ ID NO: 15709 - RNA, 20 nt, Artificial Sequence
  SAMD9 targeting guide sequence portion
auuccauguauccagcuugc

SEQ ID NO: 15710 - RNA, 20 nt, Artificial Sequence
  SAMD9 targeting guide sequence portion
auucuaaugagauuuugaag

SEQ ID NO: 15711 - RNA, 20 nt, Artificial Sequence
  SAMD9 targeting guide sequence portion
auucuagaucaugucauuua

SEQ ID NO: 15712 - RNA, 20 nt, Artificial Sequence
  SAMD9 targeting guide sequence portion
auugaagauuccaugguuau

SEQ ID NO: 15713 - RNA, 20 nt, Artificial Sequence
  SAMD9 targeting guide sequence portion
auuguuaacucaggacuaau

SEQ ID NO: 15714 - RNA, 20 nt, Artificial Sequence
  SAMD9 targeting guide sequence portion
auuucaaaagcauaaucagu

SEQ ID NO: 15715 - RNA, 20 nt, Artificial Sequence
  SAMD9 targeting guide sequence portion
auuugaacacagacuagaua

SEQ ID NO: 15716 - RNA, 20 nt, Artificial Sequence
  SAMD9 targeting guide sequence portion
auuugaggauauuaagguac

SEQ ID NO: 15717 - RNA, 20 nt, Artificial Sequence
  SAMD9 targeting guide sequence portion
auuuguaaauaaaugacaug

SEQ ID NO: 15718 - RNA, 20 nt, Artificial Sequence
  SAMD9 targeting guide sequence portion
auuuguuucugucuucaaaa

SEQ ID NO: 15719 - RNA, 20 nt, Artificial Sequence
  SAMD9 targeting guide sequence portion
auuuuaacuccauaacuuau

SEQ ID NO: 15720 - RNA, 20 nt, Artificial Sequence
  SAMD9 targeting guide sequence portion
auuuuaugcagaagcaaggg

SEQ ID NO: 15721 - RNA, 20 nt, Artificial Sequence
  SAMD9 targeting guide sequence portion
auuuucccuugcuucugcau

SEQ ID NO: 15722 - RNA, 20 nt, Artificial Sequence
  SAMD9 targeting guide sequence portion
auuuugaagacagaaacaaa

SEQ ID NO: 15723 - RNA, 20 nt, Artificial Sequence
  SAMD9 targeting guide sequence portion
auuuuguguuuggggugugg

SEQ ID NO: 15724 - RNA, 20 nt, Artificial Sequence
  SAMD9 targeting guide sequence portion
auuuuucugauugccuaaua

SEQ ID NO: 15725 - RNA, 20 nt, Artificial Sequence
  SAMD9 targeting guide sequence portion
auuuuuucacuggaggaaga

SEQ ID NO: 15726 - RNA, 20 nt, Artificial Sequence
  SAMD9 targeting guide sequence portion
caaaagcauaaucaguaaga

SEQ ID NO: 15727 - RNA, 20 nt, Artificial Sequence
  SAMD9 targeting guide sequence portion
caaaaucuaaaaucaauuau

SEQ ID NO: 15728 - RNA, 20 nt, Artificial Sequence
  SAMD9 targeting guide sequence portion
caaaaucucauuagaauuuu

SEQ ID NO: 15729 - RNA, 20 nt, Artificial Sequence
  SAMD9 targeting guide sequence portion
caaaauuacugauucuagau

SEQ ID NO: 15730 - RNA, 20 nt, Artificial Sequence
  SAMD9 targeting guide sequence portion
caaacacaaaauuacugauu

SEQ ID NO: 15731 - RNA, 20 nt, Artificial Sequence
  SAMD9 targeting guide sequence portion
caaauacuuuaguauguauc

SEQ ID NO: 15732 - RNA, 20 nt, Artificial Sequence
  SAMD9 targeting guide sequence portion
caaauaucuagucuguguuc

SEQ ID NO: 15733 - RNA, 20 nt, Artificial Sequence
  SAMD9 targeting guide sequence portion
caaauuuuucugauugccua

SEQ ID NO: 15734 - RNA, 20 nt, Artificial Sequence
  SAMD9 targeting guide sequence portion
caagagaaaauuucaaaagc

SEQ ID NO: 15735 - RNA, 20 nt, Artificial Sequence
  SAMD9 targeting guide sequence portion
caagauuaguccugaguuaa

SEQ ID NO: 15736 - RNA, 20 nt, Artificial Sequence
  SAMD9 targeting guide sequence portion
caagcuggauacauggaauu

SEQ ID NO: 15737 - RNA, 20 nt, Artificial Sequence
  SAMD9 targeting guide sequence portion
caagggaaaaucuuccucca

SEQ ID NO: 15738 - RNA, 20 nt, Artificial Sequence
  SAMD9 targeting guide sequence portion
caauaaagagugagcuuaua

SEQ ID NO: 15739 - RNA, 20 nt, Artificial Sequence
  SAMD9 targeting guide sequence portion
caauaauauaguaccuuaau

SEQ ID NO: 15740 - RNA, 20 nt, Artificial Sequence
  SAMD9 targeting guide sequence portion
caaucagaaaaauuugaaca

SEQ ID NO: 15741 - RNA, 20 nt, Artificial Sequence
  SAMD9 targeting guide sequence portion
caauggcugcaagcuggaua

SEQ ID NO: 15742 - RNA, 20 nt, Artificial Sequence
  SAMD9 targeting guide sequence portion
caauuagaaaguaacaauaa

SEQ ID NO: 15743 - RNA, 20 nt, Artificial Sequence
  SAMD9 targeting guide sequence portion
caauuauuaggcaaucagaa

SEQ ID NO: 15744 - RNA, 20 nt, Artificial Sequence
  SAMD9 targeting guide sequence portion
cacaaaauuacugauucuag

SEQ ID NO: 15745 - RNA, 20 nt, Artificial Sequence
  SAMD9 targeting guide sequence portion
cacaccccaaacacaaaauu

SEQ ID NO: 15746 - RNA, 20 nt, Artificial Sequence
  SAMD9 targeting guide sequence portion
cacacuuuucucccucuuac

SEQ ID NO: 15747 - RNA, 20 nt, Artificial Sequence
  SAMD9 targeting guide sequence portion
cacagacuagauauuugagg

SEQ ID NO: 15748 - RNA, 20 nt, Artificial Sequence
  SAMD9 targeting guide sequence portion
caccacccccacaccccaaa

SEQ ID NO: 15749 - RNA, 20 nt, Artificial Sequence
  SAMD9 targeting guide sequence portion
caccccaaacacaaaauuac

SEQ ID NO: 15750 - RNA, 20 nt, Artificial Sequence
  SAMD9 targeting guide sequence portion
cacccccacaccccaaacac

SEQ ID NO: 15751 - RNA, 20 nt, Artificial Sequence
  SAMD9 targeting guide sequence portion
cacucuuuauuguuacuuuc

SEQ ID NO: 15752 - RNA, 20 nt, Artificial Sequence
  SAMD9 targeting guide sequence portion
cacuggaggaagauuuuccc

SEQ ID NO: 15753 - RNA, 20 nt, Artificial Sequence
  SAMD9 targeting guide sequence portion
cacuuuucucccucuuacug

SEQ ID NO: 15754 - RNA, 20 nt, Artificial Sequence
  SAMD9 targeting guide sequence portion
cagaaaaauuugaacacaga

SEQ ID NO: 15755 - RNA, 20 nt, Artificial Sequence
  SAMD9 targeting guide sequence portion
cagaagcaagggaaaaucuu

SEQ ID NO: 15756 - RNA, 20 nt, Artificial Sequence
  SAMD9 targeting guide sequence portion
cagacuagauauuugaggau

SEQ ID NO: 15757 - RNA, 20 nt, Artificial Sequence
  SAMD9 targeting guide sequence portion
cagcacacuuuucucccucu

SEQ ID NO: 15758 - RNA, 20 nt, Artificial Sequence
  SAMD9 targeting guide sequence portion
cagccauuguuaacucagga

SEQ ID NO: 15759 - RNA, 20 nt, Artificial Sequence
  SAMD9 targeting guide sequence portion
cagcuugcagccauuguuaa

SEQ ID NO: 15760 - RNA, 20 nt, Artificial Sequence
  SAMD9 targeting guide sequence portion
caggacuaaucuuguuucgg

SEQ ID NO: 15761 - RNA, 20 nt, Artificial Sequence
  SAMD9 targeting guide sequence portion
caguaagagggagaaaagug

SEQ ID NO: 15762 - RNA, 20 nt, Artificial Sequence
  SAMD9 targeting guide sequence portion
caguaauuuuguguuugggg

SEQ ID NO: 15763 - RNA, 20 nt, Artificial Sequence
  SAMD9 targeting guide sequence portion
cagugaaaaaauucuaauga

SEQ ID NO: 15764 - RNA, 20 nt, Artificial Sequence
  SAMD9 targeting guide sequence portion
cauaaccauggaaucuucaa

SEQ ID NO: 15765 - RNA, 20 nt, Artificial Sequence
  SAMD9 targeting guide sequence portion
cauaacuuauaagcucacuc

SEQ ID NO: 15766 - RNA, 20 nt, Artificial Sequence
  SAMD9 targeting guide sequence portion
cauaaucaguaagagggaga

SEQ ID NO: 15767 - RNA, 20 nt, Artificial Sequence
  SAMD9 targeting guide sequence portion
caugaacucuuuaaaaaaca

SEQ ID NO: 15768 - RNA, 20 nt, Artificial Sequence
  SAMD9 targeting guide sequence portion
caugaucuagaaucaguaau

SEQ ID NO: 15769 - RNA, 20 nt, Artificial Sequence
  SAMD9 targeting guide sequence portion
caugccuuuuagagauacau

SEQ ID NO: 15770 - RNA, 20 nt, Artificial Sequence
  SAMD9 targeting guide sequence portion
cauggaaucuucaauaauau

SEQ ID NO: 15771 - RNA, 20 nt, Artificial Sequence
  SAMD9 targeting guide sequence portion
cauggaauucagcacacuuu

SEQ ID NO: 15772 - RNA, 20 nt, Artificial Sequence
  SAMD9 targeting guide sequence portion
caugguuauguuuuuuaaag

SEQ ID NO: 15773 - RNA, 20 nt, Artificial Sequence
  SAMD9 targeting guide sequence portion
cauguauccagcuugcagcc

SEQ ID NO: 15774 - RNA, 20 nt, Artificial Sequence
  SAMD9 targeting guide sequence portion
cauuagaauuuuuucacugg

SEQ ID NO: 15775 - RNA, 20 nt, Artificial Sequence
  SAMD9 targeting guide sequence portion
cauuguuaacucaggacuaa

SEQ ID NO: 15776 - RNA, 20 nt, Artificial Sequence
  SAMD9 targeting guide sequence portion
ccaaacacaaaauuacugau

SEQ ID NO: 15777 - RNA, 20 nt, Artificial Sequence
  SAMD9 targeting guide sequence portion
ccacaccccaaacacaaaau

SEQ ID NO: 15778 - RNA, 20 nt, Artificial Sequence
  SAMD9 targeting guide sequence portion
ccacccccacaccccaaaca

SEQ ID NO: 15779 - RNA, 20 nt, Artificial Sequence
  SAMD9 targeting guide sequence portion
ccagcuugcagccauuguua

SEQ ID NO: 15780 - RNA, 20 nt, Artificial Sequence
  SAMD9 targeting guide sequence portion
ccagugaaaaaauucuaaug

SEQ ID NO: 15781 - RNA, 20 nt, Artificial Sequence
  SAMD9 targeting guide sequence portion
ccauaacuuauaagcucacu

SEQ ID NO: 15782 - RNA, 20 nt, Artificial Sequence
  SAMD9 targeting guide sequence portion
ccauggaaucuucaauaaua

SEQ ID NO: 15783 - RNA, 20 nt, Artificial Sequence
  SAMD9 targeting guide sequence portion
ccaugguuauguuuuuuaaa

SEQ ID NO: 15784 - RNA, 20 nt, Artificial Sequence
  SAMD9 targeting guide sequence portion
ccauguauccagcuugcagc

SEQ ID NO: 15785 - RNA, 20 nt, Artificial Sequence
  SAMD9 targeting guide sequence portion
ccauuguuaacucaggacua

SEQ ID NO: 15786 - RNA, 20 nt, Artificial Sequence
  SAMD9 targeting guide sequence portion
cccaaacacaaaauuacuga

SEQ ID NO: 15787 - RNA, 20 nt, Artificial Sequence
  SAMD9 targeting guide sequence portion
cccacaccccaaacacaaaa

SEQ ID NO: 15788 - RNA, 20 nt, Artificial Sequence
  SAMD9 targeting guide sequence portion
ccccaaacacaaaauuacug

SEQ ID NO: 15789 - RNA, 20 nt, Artificial Sequence
  SAMD9 targeting guide sequence portion
ccccacaccccaaacacaaa

SEQ ID NO: 15790 - RNA, 20 nt, Artificial Sequence
  SAMD9 targeting guide sequence portion
cccccacaccccaaacacaa

SEQ ID NO: 15791 - RNA, 20 nt, Artificial Sequence
  SAMD9 targeting guide sequence portion
cccucuuacugauuaugcuu

SEQ ID NO: 15792 - RNA, 20 nt, Artificial Sequence
  SAMD9 targeting guide sequence portion
cccuugcuucugcauaaaau

SEQ ID NO: 15793 - RNA, 20 nt, Artificial Sequence
  SAMD9 targeting guide sequence portion
cccuuucaccacccccacac

SEQ ID NO: 15794 - RNA, 20 nt, Artificial Sequence
  SAMD9 targeting guide sequence portion
ccgaaacaagauuaguccug

SEQ ID NO: 15795 - RNA, 20 nt, Artificial Sequence
  SAMD9 targeting guide sequence portion
ccucaaauaucuagucugug

SEQ ID NO: 15796 - RNA, 20 nt, Artificial Sequence
  SAMD9 targeting guide sequence portion
ccuccagugaaaaaauucua

SEQ ID NO: 15797 - RNA, 20 nt, Artificial Sequence
  SAMD9 targeting guide sequence portion
ccucuuacugauuaugcuuu

SEQ ID NO: 15798 - RNA, 20 nt, Artificial Sequence
  SAMD9 targeting guide sequence portion
ccugaguuaacaauggcugc

SEQ ID NO: 15799 - RNA, 20 nt, Artificial Sequence
  SAMD9 targeting guide sequence portion
ccuuaauauccucaaauauc

SEQ ID NO: 15800 - RNA, 20 nt, Artificial Sequence
  SAMD9 targeting guide sequence portion
ccuugcuucugcauaaaauu

SEQ ID NO: 15801 - RNA, 20 nt, Artificial Sequence
  SAMD9 targeting guide sequence portion
ccuuucaccacccccacacc

SEQ ID NO: 15802 - RNA, 20 nt, Artificial Sequence
  SAMD9 targeting guide sequence portion
ccuuuuagagauacauacua

SEQ ID NO: 15803 - RNA, 20 nt, Artificial Sequence
  SAMD9 targeting guide sequence portion
cgaaacaagauuaguccuga

SEQ ID NO: 15804 - RNA, 20 nt, Artificial Sequence
  SAMD9 targeting guide sequence portion
cgguucuacuucccuuucac

SEQ ID NO: 15805 - RNA, 20 nt, Artificial Sequence
  SAMD9 targeting guide sequence portion
cuaaaaggcaugaacucuuu

SEQ ID NO: 15806 - RNA, 20 nt, Artificial Sequence
  SAMD9 targeting guide sequence portion
cuaaaaucaauuauuaggca

SEQ ID NO: 15807 - RNA, 20 nt, Artificial Sequence
  SAMD9 targeting guide sequence portion
cuaaauguuuuacaagagaa

SEQ ID NO: 15808 - RNA, 20 nt, Artificial Sequence
  SAMD9 targeting guide sequence portion
cuaaucuuguuucgguucua

SEQ ID NO: 15809 - RNA, 20 nt, Artificial Sequence
  SAMD9 targeting guide sequence portion
cuaaugagauuuugaagaca

SEQ ID NO: 15810 - RNA, 20 nt, Artificial Sequence
  SAMD9 targeting guide sequence portion
cuacuucccuuucaccaccc

SEQ ID NO: 15811 - RNA, 20 nt, Artificial Sequence
  SAMD9 targeting guide sequence portion
cuagaaucaguaauuuugug

SEQ ID NO: 15812 - RNA, 20 nt, Artificial Sequence
  SAMD9 targeting guide sequence portion
cuagauauuugaggauauua

SEQ ID NO: 15813 - RNA, 20 nt, Artificial Sequence
  SAMD9 targeting guide sequence portion
cuagaucaugucauuuauuu

SEQ ID NO: 15814 - RNA, 20 nt, Artificial Sequence
  SAMD9 targeting guide sequence portion
cuagucuguguucaaauuuu

SEQ ID NO: 15815 - RNA, 20 nt, Artificial Sequence
  SAMD9 targeting guide sequence portion
cuauauuauugaagauucca

SEQ ID NO: 15816 - RNA, 20 nt, Artificial Sequence
  SAMD9 targeting guide sequence portion
cucaaauaucuagucugugu

SEQ ID NO: 15817 - RNA, 20 nt, Artificial Sequence
  SAMD9 targeting guide sequence portion
cucacucuuuauuguuacuu

SEQ ID NO: 15818 - RNA, 20 nt, Artificial Sequence
  SAMD9 targeting guide sequence portion
cucaggacuaaucuuguuuc

SEQ ID NO: 15819 - RNA, 20 nt, Artificial Sequence
  SAMD9 targeting guide sequence portion
cucauuagaauuuuuucacu

SEQ ID NO: 15820 - RNA, 20 nt, Artificial Sequence
  SAMD9 targeting guide sequence portion
cuccagugaaaaaauucuaa

SEQ ID NO: 15821 - RNA, 20 nt, Artificial Sequence
  SAMD9 targeting guide sequence portion
cuccauaacuuauaagcuca

SEQ ID NO: 15822 - RNA, 20 nt, Artificial Sequence
  SAMD9 targeting guide sequence portion
cucccucuuacugauuaugc

SEQ ID NO: 15823 - RNA, 20 nt, Artificial Sequence
  SAMD9 targeting guide sequence portion
cucuaaaaggcaugaacucu

SEQ ID NO: 15824 - RNA, 20 nt, Artificial Sequence
  SAMD9 targeting guide sequence portion
cucuuacugauuaugcuuuu

SEQ ID NO: 15825 - RNA, 20 nt, Artificial Sequence
  SAMD9 targeting guide sequence portion
cucuuguaaaacauuuagaa

SEQ ID NO: 15826 - RNA, 20 nt, Artificial Sequence
  SAMD9 targeting guide sequence portion
cucuuuaaaaaacauaacca

SEQ ID NO: 15827 - RNA, 20 nt, Artificial Sequence
  SAMD9 targeting guide sequence portion
cucuuuauuguuacuuucua

SEQ ID NO: 15828 - RNA, 20 nt, Artificial Sequence
  SAMD9 targeting guide sequence portion
cugaauuccauguauccagc

SEQ ID NO: 15829 - RNA, 20 nt, Artificial Sequence
  SAMD9 targeting guide sequence portion
cugaguuaacaauggcugca

SEQ ID NO: 15830 - RNA, 20 nt, Artificial Sequence
  SAMD9 targeting guide sequence portion
cugauuaugcuuuugaaauu

SEQ ID NO: 15831 - RNA, 20 nt, Artificial Sequence
  SAMD9 targeting guide sequence portion
cugauucuagaucaugucau

SEQ ID NO: 15832 - RNA, 20 nt, Artificial Sequence
  SAMD9 targeting guide sequence portion
cugauugccuaauaauugau

SEQ ID NO: 15833 - RNA, 20 nt, Artificial Sequence
  SAMD9 targeting guide sequence portion
cugcaagcuggauacaugga

SEQ ID NO: 15834 - RNA, 20 nt, Artificial Sequence
  SAMD9 targeting guide sequence portion
cugcauaaaauuuuaacucc

SEQ ID NO: 15835 - RNA, 20 nt, Artificial Sequence
  SAMD9 targeting guide sequence portion
cuggaggaagauuuucccuu

SEQ ID NO: 15836 - RNA, 20 nt, Artificial Sequence
  SAMD9 targeting guide sequence portion
cuggauacauggaauucagc

SEQ ID NO: 15837 - RNA, 20 nt, Artificial Sequence
  SAMD9 targeting guide sequence portion
cugucuucaaaaucucauua

SEQ ID NO: 15838 - RNA, 20 nt, Artificial Sequence
  SAMD9 targeting guide sequence portion
cuguguucaaauuuuucuga

SEQ ID NO: 15839 - RNA, 20 nt, Artificial Sequence
  SAMD9 targeting guide sequence portion
cuuaauauccucaaauaucu

SEQ ID NO: 15840 - RNA, 20 nt, Artificial Sequence
  SAMD9 targeting guide sequence portion
cuuacugauuaugcuuuuga

SEQ ID NO: 15841 - RNA, 20 nt, Artificial Sequence
  SAMD9 targeting guide sequence portion
cuuauaagcucacucuuuau

SEQ ID NO: 15842 - RNA, 20 nt, Artificial Sequence
  SAMD9 targeting guide sequence portion
cuucaaaaucucauuagaau

SEQ ID NO: 15843 - RNA, 20 nt, Artificial Sequence
  SAMD9 targeting guide sequence portion
cuucaauaauauaguaccuu

SEQ ID NO: 15844 - RNA, 20 nt, Artificial Sequence
  SAMD9 targeting guide sequence portion
cuucccuuucaccaccccca

SEQ ID NO: 15845 - RNA, 20 nt, Artificial Sequence
  SAMD9 targeting guide sequence portion
cuuccuccagugaaaaaauu

SEQ ID NO: 15846 - RNA, 20 nt, Artificial Sequence
  SAMD9 targeting guide sequence portion
cuucugcauaaaauuuuaac

SEQ ID NO: 15847 - RNA, 20 nt, Artificial Sequence
  SAMD9 targeting guide sequence portion
cuugcagccauuguuaacuc

SEQ ID NO: 15848 - RNA, 20 nt, Artificial Sequence
  SAMD9 targeting guide sequence portion
cuugcuucugcauaaaauuu

SEQ ID NO: 15849 - RNA, 20 nt, Artificial Sequence
  SAMD9 targeting guide sequence portion
cuuguuucgguucuacuucc

SEQ ID NO: 15850 - RNA, 20 nt, Artificial Sequence
  SAMD9 targeting guide sequence portion
cuuuaaaaaacauaaccaug

SEQ ID NO: 15851 - RNA, 20 nt, Artificial Sequence
  SAMD9 targeting guide sequence portion
cuuuaguauguaucucuaaa

SEQ ID NO: 15852 - RNA, 20 nt, Artificial Sequence
  SAMD9 targeting guide sequence portion
cuuuauuguuacuuucuaau

SEQ ID NO: 15853 - RNA, 20 nt, Artificial Sequence
  SAMD9 targeting guide sequence portion
cuuucaccacccccacaccc

SEQ ID NO: 15854 - RNA, 20 nt, Artificial Sequence
  SAMD9 targeting guide sequence portion
cuuuuagagauacauacuaa

SEQ ID NO: 15855 - RNA, 20 nt, Artificial Sequence
  SAMD9 targeting guide sequence portion
cuuuucucccucuuacugau

SEQ ID NO: 15856 - RNA, 20 nt, Artificial Sequence
  SAMD9 targeting guide sequence portion
cuuuugaaauuuucucuugu

SEQ ID NO: 15857 - RNA, 20 nt, Artificial Sequence
  SAMD9 targeting guide sequence portion
gaaaaaauucuaaugagauu

SEQ ID NO: 15858 - RNA, 20 nt, Artificial Sequence
  SAMD9 targeting guide sequence portion
gaaaaauuugaacacagacu

SEQ ID NO: 15859 - RNA, 20 nt, Artificial Sequence
  SAMD9 targeting guide sequence portion
gaaaagugugcugaauucca

SEQ ID NO: 15860 - RNA, 20 nt, Artificial Sequence
  SAMD9 targeting guide sequence portion
gaaaaucuuccuccagugaa

SEQ ID NO: 15861 - RNA, 20 nt, Artificial Sequence
  SAMD9 targeting guide sequence portion
gaaaauuucaaaagcauaau

SEQ ID NO: 15862 - RNA, 20 nt, Artificial Sequence
  SAMD9 targeting guide sequence portion
gaaacaagauuaguccugag

SEQ ID NO: 15863 - RNA, 20 nt, Artificial Sequence
  SAMD9 targeting guide sequence portion
gaaagggaaguagaaccgaa

SEQ ID NO: 15864 - RNA, 20 nt, Artificial Sequence
  SAMD9 targeting guide sequence portion
gaaaguaacaauaaagagug

SEQ ID NO: 15865 - RNA, 20 nt, Artificial Sequence
  SAMD9 targeting guide sequence portion
gaaauuuucucuuguaaaac

SEQ ID NO: 15866 - RNA, 20 nt, Artificial Sequence
  SAMD9 targeting guide sequence portion
gaacacagacuagauauuug

SEQ ID NO: 15867 - RNA, 20 nt, Artificial Sequence
  SAMD9 targeting guide sequence portion
gaaccgaaacaagauuaguc

SEQ ID NO: 15868 - RNA, 20 nt, Artificial Sequence
  SAMD9 targeting guide sequence portion
gaacucuuuaaaaaacauaa

SEQ ID NO: 15869 - RNA, 20 nt, Artificial Sequence
  SAMD9 targeting guide sequence portion
gaagacagaaacaaaucaca

SEQ ID NO: 15870 - RNA, 20 nt, Artificial Sequence
  SAMD9 targeting guide sequence portion
gaagauuccaugguuauguu

SEQ ID NO: 15871 - RNA, 20 nt, Artificial Sequence
  SAMD9 targeting guide sequence portion
gaagauuuucccuugcuucu

SEQ ID NO: 15872 - RNA, 20 nt, Artificial Sequence
  SAMD9 targeting guide sequence portion
gaagcaagggaaaaucuucc

SEQ ID NO: 15873 - RNA, 20 nt, Artificial Sequence
  SAMD9 targeting guide sequence portion
gaaguagaaccgaaacaaga

SEQ ID NO: 15874 - RNA, 20 nt, Artificial Sequence
  SAMD9 targeting guide sequence portion
gaaucaguaauuuuguguuu

SEQ ID NO: 15875 - RNA, 20 nt, Artificial Sequence
  SAMD9 targeting guide sequence portion
gaaucuucaauaauauagua

SEQ ID NO: 15876 - RNA, 20 nt, Artificial Sequence
  SAMD9 targeting guide sequence portion
gaauucagcacacuuuucuc

SEQ ID NO: 15877 - RNA, 20 nt, Artificial Sequence
  SAMD9 targeting guide sequence portion
gaauuccauguauccagcuu

SEQ ID NO: 15878 - RNA, 20 nt, Artificial Sequence
  SAMD9 targeting guide sequence portion
gaauuuuuucacuggaggaa

SEQ ID NO: 15879 - RNA, 20 nt, Artificial Sequence
  SAMD9 targeting guide sequence portion
gacaugaucuagaaucagua

SEQ ID NO: 15880 - RNA, 20 nt, Artificial Sequence
  SAMD9 targeting guide sequence portion
gacuaaucuuguuucgguuc

SEQ ID NO: 15881 - RNA, 20 nt, Artificial Sequence
  SAMD9 targeting guide sequence portion
gacuagauauuugaggauau

SEQ ID NO: 15882 - RNA, 20 nt, Artificial Sequence
  SAMD9 targeting guide sequence portion
gagaaaagugugcugaauuc

SEQ ID NO: 15883 - RNA, 20 nt, Artificial Sequence
  SAMD9 targeting guide sequence portion
gagaaaauuucaaaagcaua

SEQ ID NO: 15884 - RNA, 20 nt, Artificial Sequence
  SAMD9 targeting guide sequence portion
gagauacauacuaaaguauu

SEQ ID NO: 15885 - RNA, 20 nt, Artificial Sequence
  SAMD9 targeting guide sequence portion
gagauuuugaagacagaaac

SEQ ID NO: 15886 - RNA, 20 nt, Artificial Sequence
  SAMD9 targeting guide sequence portion
gagcuuauaaguuauggagu

SEQ ID NO: 15887 - RNA, 20 nt, Artificial Sequence
  SAMD9 targeting guide sequence portion
gaggaagauuuucccuugcu

SEQ ID NO: 15888 - RNA, 20 nt, Artificial Sequence
  SAMD9 targeting guide sequence portion
gaggauauuaagguacuaua

SEQ ID NO: 15889 - RNA, 20 nt, Artificial Sequence
  SAMD9 targeting guide sequence portion
gagggagaaaagugugcuga

SEQ ID NO: 15890 - RNA, 20 nt, Artificial Sequence
  SAMD9 targeting guide sequence portion
gagugagcuuauaaguuaug

SEQ ID NO: 15891 - RNA, 20 nt, Artificial Sequence
  SAMD9 targeting guide sequence portion
gaguuaaaauuuuaugcaga

SEQ ID NO: 15892 - RNA, 20 nt, Artificial Sequence
  SAMD9 targeting guide sequence portion
gaguuaacaauggcugcaag

SEQ ID NO: 15893 - RNA, 20 nt, Artificial Sequence
  SAMD9 targeting guide sequence portion
gaguucaugccuuuuagaga

SEQ ID NO: 15894 - RNA, 20 nt, Artificial Sequence
  SAMD9 targeting guide sequence portion
gauacauggaauucagcaca

SEQ ID NO: 15895 - RNA, 20 nt, Artificial Sequence
  SAMD9 targeting guide sequence portion
gauauuaagguacuauauua

SEQ ID NO: 15896 - RNA, 20 nt, Artificial Sequence
  SAMD9 targeting guide sequence portion
gauauuugaggauauuaagg

SEQ ID NO: 15897 - RNA, 20 nt, Artificial Sequence
  SAMD9 targeting guide sequence portion
gaucaugucauuuauuuaca

SEQ ID NO: 15898 - RNA, 20 nt, Artificial Sequence
  SAMD9 targeting guide sequence portion
gaucuagaaucaguaauuuu

SEQ ID NO: 15899 - RNA, 20 nt, Artificial Sequence
  SAMD9 targeting guide sequence portion
gauuaguccugaguuaacaa

SEQ ID NO: 15900 - RNA, 20 nt, Artificial Sequence
  SAMD9 targeting guide sequence portion
gauuaugcuuuugaaauuuu

SEQ ID NO: 15901 - RNA, 20 nt, Artificial Sequence
  SAMD9 targeting guide sequence portion
gauuccaugguuauguuuuu

SEQ ID NO: 15902 - RNA, 20 nt, Artificial Sequence
  SAMD9 targeting guide sequence portion
gauucuagaucaugucauuu

SEQ ID NO: 15903 - RNA, 20 nt, Artificial Sequence
  SAMD9 targeting guide sequence portion
gauugccuaauaauugauuu

SEQ ID NO: 15904 - RNA, 20 nt, Artificial Sequence
  SAMD9 targeting guide sequence portion
gauuuguuucugucuucaaa

SEQ ID NO: 15905 - RNA, 20 nt, Artificial Sequence
  SAMD9 targeting guide sequence portion
gauuuucccuugcuucugca

SEQ ID NO: 15906 - RNA, 20 nt, Artificial Sequence
  SAMD9 targeting guide sequence portion
gauuuugaagacagaaacaa

SEQ ID NO: 15907 - RNA, 20 nt, Artificial Sequence
  SAMD9 targeting guide sequence portion
gcaagcuggauacauggaau

SEQ ID NO: 15908 - RNA, 20 nt, Artificial Sequence
  SAMD9 targeting guide sequence portion
gcaagggaaaaucuuccucc

SEQ ID NO: 15909 - RNA, 20 nt, Artificial Sequence
  SAMD9 targeting guide sequence portion
gcaaucagaaaaauuugaac

SEQ ID NO: 15910 - RNA, 20 nt, Artificial Sequence
  SAMD9 targeting guide sequence portion
gcacacuuuucucccucuua

SEQ ID NO: 15911 - RNA, 20 nt, Artificial Sequence
  SAMD9 targeting guide sequence portion
gcagaagcaagggaaaaucu

SEQ ID NO: 15912 - RNA, 20 nt, Artificial Sequence
  SAMD9 targeting guide sequence portion
gcagccauuguuaacucagg

SEQ ID NO: 15913 - RNA, 20 nt, Artificial Sequence
  SAMD9 targeting guide sequence portion
gcauaaaauuuuaacuccau

SEQ ID NO: 15914 - RNA, 20 nt, Artificial Sequence
  SAMD9 targeting guide sequence portion
gcauaaucaguaagagggag

SEQ ID NO: 15915 - RNA, 20 nt, Artificial Sequence
  SAMD9 targeting guide sequence portion
gcaugaacucuuuaaaaaac

SEQ ID NO: 15916 - RNA, 20 nt, Artificial Sequence
  SAMD9 targeting guide sequence portion
gccauuguuaacucaggacu

SEQ ID NO: 15917 - RNA, 20 nt, Artificial Sequence
  SAMD9 targeting guide sequence portion
gccuuuuagagauacauacu

SEQ ID NO: 15918 - RNA, 20 nt, Artificial Sequence
  SAMD9 targeting guide sequence portion
gcucacucuuuauuguuacu

SEQ ID NO: 15919 - RNA, 20 nt, Artificial Sequence
  SAMD9 targeting guide sequence portion
gcugaauuccauguauccag

SEQ ID NO: 15920 - RNA, 20 nt, Artificial Sequence
  SAMD9 targeting guide sequence portion
gcugcaagcuggauacaugg

SEQ ID NO: 15921 - RNA, 20 nt, Artificial Sequence
  SAMD9 targeting guide sequence portion
gcuggauacauggaauucag

SEQ ID NO: 15922 - RNA, 20 nt, Artificial Sequence
  SAMD9 targeting guide sequence portion
gcuuauaaguuauggaguua

SEQ ID NO: 15923 - RNA, 20 nt, Artificial Sequence
  SAMD9 targeting guide sequence portion
gcuucugcauaaaauuuuaa

SEQ ID NO: 15924 - RNA, 20 nt, Artificial Sequence
  SAMD9 targeting guide sequence portion
gcuugcagccauuguuaacu

SEQ ID NO: 15925 - RNA, 20 nt, Artificial Sequence
  SAMD9 targeting guide sequence portion
gcuuuugaaauuuucucuug

SEQ ID NO: 15926 - RNA, 20 nt, Artificial Sequence
  SAMD9 targeting guide sequence portion
ggaaaaucuuccuccaguga

SEQ ID NO: 15927 - RNA, 20 nt, Artificial Sequence
  SAMD9 targeting guide sequence portion
ggaagauuuucccuugcuuc

SEQ ID NO: 15928 - RNA, 20 nt, Artificial Sequence
  SAMD9 targeting guide sequence portion
ggaaguagaaccgaaacaag

SEQ ID NO: 15929 - RNA, 20 nt, Artificial Sequence
  SAMD9 targeting guide sequence portion
ggaaucuucaauaauauagu

SEQ ID NO: 15930 - RNA, 20 nt, Artificial Sequence
  SAMD9 targeting guide sequence portion
ggaauucagcacacuuuucu

SEQ ID NO: 15931 - RNA, 20 nt, Artificial Sequence
  SAMD9 targeting guide sequence portion
ggacuaaucuuguuucgguu

SEQ ID NO: 15932 - RNA, 20 nt, Artificial Sequence
  SAMD9 targeting guide sequence portion
ggagaaaagugugcugaauu

SEQ ID NO: 15933 - RNA, 20 nt, Artificial Sequence
  SAMD9 targeting guide sequence portion
ggaggaagauuuucccuugc

SEQ ID NO: 15934 - RNA, 20 nt, Artificial Sequence
  SAMD9 targeting guide sequence portion
ggaguuaaaauuuuaugcag

SEQ ID NO: 15935 - RNA, 20 nt, Artificial Sequence
  SAMD9 targeting guide sequence portion
ggauacauggaauucagcac

SEQ ID NO: 15936 - RNA, 20 nt, Artificial Sequence
  SAMD9 targeting guide sequence portion
ggauauuaagguacuauauu

SEQ ID NO: 15937 - RNA, 20 nt, Artificial Sequence
  SAMD9 targeting guide sequence portion
ggcaaucagaaaaauuugaa

SEQ ID NO: 15938 - RNA, 20 nt, Artificial Sequence
  SAMD9 targeting guide sequence portion
ggcaugaacucuuuaaaaaa

SEQ ID NO: 15939 - RNA, 20 nt, Artificial Sequence
  SAMD9 targeting guide sequence portion
ggcugcaagcuggauacaug

SEQ ID NO: 15940 - RNA, 20 nt, Artificial Sequence
  SAMD9 targeting guide sequence portion
gggaaaaucuuccuccagug

SEQ ID NO: 15941 - RNA, 20 nt, Artificial Sequence
  SAMD9 targeting guide sequence portion
gggaaguagaaccgaaacaa

SEQ ID NO: 15942 - RNA, 20 nt, Artificial Sequence
  SAMD9 targeting guide sequence portion
gggagaaaagugugcugaau

SEQ ID NO: 15943 - RNA, 20 nt, Artificial Sequence
  SAMD9 targeting guide sequence portion
ggggguggugaaagggaagu

SEQ ID NO: 15944 - RNA, 20 nt, Artificial Sequence
  SAMD9 targeting guide sequence portion
gggguggugaaagggaagua

SEQ ID NO: 15945 - RNA, 20 nt, Artificial Sequence
  SAMD9 targeting guide sequence portion
gggguguggggguggugaaa

SEQ ID NO: 15946 - RNA, 20 nt, Artificial Sequence
  SAMD9 targeting guide sequence portion
ggguggugaaagggaaguag

SEQ ID NO: 15947 - RNA, 20 nt, Artificial Sequence
  SAMD9 targeting guide sequence portion
ggguguggggguggugaaag

SEQ ID NO: 15948 - RNA, 20 nt, Artificial Sequence
  SAMD9 targeting guide sequence portion
gguacuauauuauugaagau

SEQ ID NO: 15949 - RNA, 20 nt, Artificial Sequence
  SAMD9 targeting guide sequence portion
ggugaaagggaaguagaacc

SEQ ID NO: 15950 - RNA, 20 nt, Artificial Sequence
  SAMD9 targeting guide sequence portion
gguggugaaagggaaguaga

SEQ ID NO: 15951 - RNA, 20 nt, Artificial Sequence
  SAMD9 targeting guide sequence portion
gguguggggguggugaaagg

SEQ ID NO: 15952 - RNA, 20 nt, Artificial Sequence
  SAMD9 targeting guide sequence portion
gguuauguuuuuuaaagagu

SEQ ID NO: 15953 - RNA, 20 nt, Artificial Sequence
  SAMD9 targeting guide sequence portion
gguucuacuucccuuucacc

SEQ ID NO: 15954 - RNA, 20 nt, Artificial Sequence
  SAMD9 targeting guide sequence portion
guaaauaaaugacaugaucu

SEQ ID NO: 15955 - RNA, 20 nt, Artificial Sequence
  SAMD9 targeting guide sequence portion
guaacaauaaagagugagcu

SEQ ID NO: 15956 - RNA, 20 nt, Artificial Sequence
  SAMD9 targeting guide sequence portion
guaagagggagaaaagugug

SEQ ID NO: 15957 - RNA, 20 nt, Artificial Sequence
  SAMD9 targeting guide sequence portion
guaauuuuguguuuggggug

SEQ ID NO: 15958 - RNA, 20 nt, Artificial Sequence
  SAMD9 targeting guide sequence portion
guaccuuaauauccucaaau

SEQ ID NO: 15959 - RNA, 20 nt, Artificial Sequence
  SAMD9 targeting guide sequence portion
guacuauauuauugaagauu

SEQ ID NO: 15960 - RNA, 20 nt, Artificial Sequence
  SAMD9 targeting guide sequence portion
guagaaccgaaacaagauua

SEQ ID NO: 15961 - RNA, 20 nt, Artificial Sequence
  SAMD9 targeting guide sequence portion
guauccagcuugcagccauu

SEQ ID NO: 15962 - RNA, 20 nt, Artificial Sequence
  SAMD9 targeting guide sequence portion
guaucucuaaaaggcaugaa

SEQ ID NO: 15963 - RNA, 20 nt, Artificial Sequence
  SAMD9 targeting guide sequence portion
guauguaucucuaaaaggca

SEQ ID NO: 15964 - RNA, 20 nt, Artificial Sequence
  SAMD9 targeting guide sequence portion
guauuuguaaauaaaugaca

SEQ ID NO: 15965 - RNA, 20 nt, Artificial Sequence
  SAMD9 targeting guide sequence portion
gucaauuagaaaguaacaau

SEQ ID NO: 15966 - RNA, 20 nt, Artificial Sequence
  SAMD9 targeting guide sequence portion
guccugaguuaacaauggcu

SEQ ID NO: 15967 - RNA, 20 nt, Artificial Sequence
  SAMD9 targeting guide sequence portion
gucuguguucaaauuuuucu

SEQ ID NO: 15968 - RNA, 20 nt, Artificial Sequence
  SAMD9 targeting guide sequence portion
gucuucaaaaucucauuaga

SEQ ID NO: 15969 - RNA, 20 nt, Artificial Sequence
  SAMD9 targeting guide sequence portion
gugaaaaaauucuaaugaga

SEQ ID NO: 15970 - RNA, 20 nt, Artificial Sequence
  SAMD9 targeting guide sequence portion
gugaaagggaaguagaaccg

SEQ ID NO: 15971 - RNA, 20 nt, Artificial Sequence
  SAMD9 targeting guide sequence portion
gugagcuuauaaguuaugga

SEQ ID NO: 15972 - RNA, 20 nt, Artificial Sequence
  SAMD9 targeting guide sequence portion
gugauuuguuucugucuuca

SEQ ID NO: 15973 - RNA, 20 nt, Artificial Sequence
  SAMD9 targeting guide sequence portion
gugcugaauuccauguaucc

SEQ ID NO: 15974 - RNA, 20 nt, Artificial Sequence
  SAMD9 targeting guide sequence portion
guggggguggugaaagggaa

SEQ ID NO: 15975 - RNA, 20 nt, Artificial Sequence
  SAMD9 targeting guide sequence portion
guggugaaagggaaguagaa

SEQ ID NO: 15976 - RNA, 20 nt, Artificial Sequence
  SAMD9 targeting guide sequence portion
gugugcugaauuccauguau

SEQ ID NO: 15977 - RNA, 20 nt, Artificial Sequence
  SAMD9 targeting guide sequence portion
guguggggguggugaaaggg

SEQ ID NO: 15978 - RNA, 20 nt, Artificial Sequence
  SAMD9 targeting guide sequence portion
guguucaaauuuuucugauu

SEQ ID NO: 15979 - RNA, 20 nt, Artificial Sequence
  SAMD9 targeting guide sequence portion
guguuuggggugugggggug

SEQ ID NO: 15980 - RNA, 20 nt, Artificial Sequence
  SAMD9 targeting guide sequence portion
guuaaaauuuuaugcagaag

SEQ ID NO: 15981 - RNA, 20 nt, Artificial Sequence
  SAMD9 targeting guide sequence portion
guuaacaauggcugcaagcu

SEQ ID NO: 15982 - RNA, 20 nt, Artificial Sequence
  SAMD9 targeting guide sequence portion
guuaacucaggacuaaucuu

SEQ ID NO: 15983 - RNA, 20 nt, Artificial Sequence
  SAMD9 targeting guide sequence portion
guuauggaguuaaaauuuua

SEQ ID NO: 15984 - RNA, 20 nt, Artificial Sequence
  SAMD9 targeting guide sequence portion
guuauguuuuuuaaagaguu

SEQ ID NO: 15985 - RNA, 20 nt, Artificial Sequence
  SAMD9 targeting guide sequence portion
guucaaauuuuucugauugc

SEQ ID NO: 15986 - RNA, 20 nt, Artificial Sequence
  SAMD9 targeting guide sequence portion
guucaugccuuuuagagaua

SEQ ID NO: 15987 - RNA, 20 nt, Artificial Sequence
  SAMD9 targeting guide sequence portion
guucuacuucccuuucacca

SEQ ID NO: 15988 - RNA, 20 nt, Artificial Sequence
  SAMD9 targeting guide sequence portion
guuucgguucuacuucccuu

SEQ ID NO: 15989 - RNA, 20 nt, Artificial Sequence
  SAMD9 targeting guide sequence portion
guuucugucuucaaaaucuc

SEQ ID NO: 15990 - RNA, 20 nt, Artificial Sequence
  SAMD9 targeting guide sequence portion
guuugggguguggggguggu

SEQ ID NO: 15991 - RNA, 20 nt, Artificial Sequence
  SAMD9 targeting guide sequence portion
guuuuacaagagaaaauuuc

SEQ ID NO: 15992 - RNA, 20 nt, Artificial Sequence
  SAMD9 targeting guide sequence portion
guuuucuaaauguuuuacaa

SEQ ID NO: 15993 - RNA, 20 nt, Artificial Sequence
  SAMD9 targeting guide sequence portion
guuuuuuaaagaguucaugc

SEQ ID NO: 15994 - RNA, 20 nt, Artificial Sequence
  SAMD9 targeting guide sequence portion
uaaaaaacauaaccauggaa

SEQ ID NO: 15995 - RNA, 20 nt, Artificial Sequence
  SAMD9 targeting guide sequence portion
uaaaaggcaugaacucuuua

SEQ ID NO: 15996 - RNA, 20 nt, Artificial Sequence
  SAMD9 targeting guide sequence portion
uaaaaucaauuauuaggcaa

SEQ ID NO: 15997 - RNA, 20 nt, Artificial Sequence
  SAMD9 targeting guide sequence portion
uaaaauuuuaugcagaagca

SEQ ID NO: 15998 - RNA, 20 nt, Artificial Sequence
  SAMD9 targeting guide sequence portion
uaaagagugagcuuauaagu

SEQ ID NO: 15999 - RNA, 20 nt, Artificial Sequence
  SAMD9 targeting guide sequence portion
uaaagaguucaugccuuuua

SEQ ID NO: 16000 - RNA, 20 nt, Artificial Sequence
  SAMD9 targeting guide sequence portion
uaaauaaaugacaugaucua

SEQ ID NO: 16001 - RNA, 20 nt, Artificial Sequence
  SAMD9 targeting guide sequence portion
uaaaugacaugaucuagaau

SEQ ID NO: 16002 - RNA, 20 nt, Artificial Sequence
  SAMD9 targeting guide sequence portion
uaacaauaaagagugagcuu

SEQ ID NO: 16003 - RNA, 20 nt, Artificial Sequence
  SAMD9 targeting guide sequence portion
uaacaauggcugcaagcugg

SEQ ID NO: 16004 - RNA, 20 nt, Artificial Sequence
  SAMD9 targeting guide sequence portion
uaaccauggaaucuucaaua

SEQ ID NO: 16005 - RNA, 20 nt, Artificial Sequence
  SAMD9 targeting guide sequence portion
uaacucaggacuaaucuugu

SEQ ID NO: 16006 - RNA, 20 nt, Artificial Sequence
  SAMD9 targeting guide sequence portion
uaacuccauaacuuauaagc

SEQ ID NO: 16007 - RNA, 20 nt, Artificial Sequence
  SAMD9 targeting guide sequence portion
uaacuuauaagcucacucuu

SEQ ID NO: 16008 - RNA, 20 nt, Artificial Sequence
  SAMD9 targeting guide sequence portion
uaagagggagaaaagugugc

SEQ ID NO: 16009 - RNA, 20 nt, Artificial Sequence
  SAMD9 targeting guide sequence portion
uaagcucacucuuuauuguu

SEQ ID NO: 16010 - RNA, 20 nt, Artificial Sequence
  SAMD9 targeting guide sequence portion
uaagguacuauauuauugaa

SEQ ID NO: 16011 - RNA, 20 nt, Artificial Sequence
  SAMD9 targeting guide sequence portion
uaaguuauggaguuaaaauu

SEQ ID NO: 16012 - RNA, 20 nt, Artificial Sequence
  SAMD9 targeting guide sequence portion
uaauauaguaccuuaauauc

SEQ ID NO: 16013 - RNA, 20 nt, Artificial Sequence
  SAMD9 targeting guide sequence portion
uaauauccucaaauaucuag

SEQ ID NO: 16014 - RNA, 20 nt, Artificial Sequence
  SAMD9 targeting guide sequence portion
uaaucaguaagagggagaaa

SEQ ID NO: 16015 - RNA, 20 nt, Artificial Sequence
  SAMD9 targeting guide sequence portion
uaaucuuguuucgguucuac

SEQ ID NO: 16016 - RNA, 20 nt, Artificial Sequence
  SAMD9 targeting guide sequence portion
uaaugagauuuugaagacag

SEQ ID NO: 16017 - RNA, 20 nt, Artificial Sequence
  SAMD9 targeting guide sequence portion
uaauuuuguguuuggggugu

SEQ ID NO: 16018 - RNA, 20 nt, Artificial Sequence
  SAMD9 targeting guide sequence portion
uacaaauacuuuaguaugua

SEQ ID NO: 16019 - RNA, 20 nt, Artificial Sequence
  SAMD9 targeting guide sequence portion
uacaagagaaaauuucaaaa

SEQ ID NO: 16020 - RNA, 20 nt, Artificial Sequence
  SAMD9 targeting guide sequence portion
uacauggaauucagcacacu

SEQ ID NO: 16021 - RNA, 20 nt, Artificial Sequence
  SAMD9 targeting guide sequence portion
uaccuuaauauccucaaaua

SEQ ID NO: 16022 - RNA, 20 nt, Artificial Sequence
  SAMD9 targeting guide sequence portion
uacuauauuauugaagauuc

SEQ ID NO: 16023 - RNA, 20 nt, Artificial Sequence
  SAMD9 targeting guide sequence portion
uacugauuaugcuuuugaaa

SEQ ID NO: 16024 - RNA, 20 nt, Artificial Sequence
  SAMD9 targeting guide sequence portion
uacugauucuagaucauguc

SEQ ID NO: 16025 - RNA, 20 nt, Artificial Sequence
  SAMD9 targeting guide sequence portion
uacuucccuuucaccacccc

SEQ ID NO: 16026 - RNA, 20 nt, Artificial Sequence
  SAMD9 targeting guide sequence portion
uacuuuaguauguaucucua

SEQ ID NO: 16027 - RNA, 20 nt, Artificial Sequence
  SAMD9 targeting guide sequence portion
uagaaaguaacaauaaagag

SEQ ID NO: 16028 - RNA, 20 nt, Artificial Sequence
  SAMD9 targeting guide sequence portion
uagaaccgaaacaagauuag

SEQ ID NO: 16029 - RNA, 20 nt, Artificial Sequence
  SAMD9 targeting guide sequence portion
uagaaucaguaauuuugugu

SEQ ID NO: 16030 - RNA, 20 nt, Artificial Sequence
  SAMD9 targeting guide sequence portion
uagaauuuuuucacuggagg

SEQ ID NO: 16031 - RNA, 20 nt, Artificial Sequence
  SAMD9 targeting guide sequence portion
uagagauacauacuaaagua

SEQ ID NO: 16032 - RNA, 20 nt, Artificial Sequence
  SAMD9 targeting guide sequence portion
uagauauuugaggauauuaa

SEQ ID NO: 16033 - RNA, 20 nt, Artificial Sequence
  SAMD9 targeting guide sequence portion
uaggcaaucagaaaaauuug

SEQ ID NO: 16034 - RNA, 20 nt, Artificial Sequence
  SAMD9 targeting guide sequence portion
uaguaccuuaauauccucaa

SEQ ID NO: 16035 - RNA, 20 nt, Artificial Sequence
  SAMD9 targeting guide sequence portion
uaguauguaucucuaaaagg

SEQ ID NO: 16036 - RNA, 20 nt, Artificial Sequence
  SAMD9 targeting guide sequence portion
uaguccugaguuaacaaugg

SEQ ID NO: 16037 - RNA, 20 nt, Artificial Sequence
  SAMD9 targeting guide sequence portion
uagucuguguucaaauuuuu

SEQ ID NO: 16038 - RNA, 20 nt, Artificial Sequence
  SAMD9 targeting guide sequence portion
uauaagcucacucuuuauug

SEQ ID NO: 16039 - RNA, 20 nt, Artificial Sequence
  SAMD9 targeting guide sequence portion
uauaguaccuuaauauccuc

SEQ ID NO: 16040 - RNA, 20 nt, Artificial Sequence
  SAMD9 targeting guide sequence portion
uauauuauugaagauuccau

SEQ ID NO: 16041 - RNA, 20 nt, Artificial Sequence
  SAMD9 targeting guide sequence portion
uauccagcuugcagccauug

SEQ ID NO: 16042 - RNA, 20 nt, Artificial Sequence
  SAMD9 targeting guide sequence portion
uauccucaaauaucuagucu

SEQ ID NO: 16043 - RNA, 20 nt, Artificial Sequence
  SAMD9 targeting guide sequence portion
uaucuagucuguguucaaau

SEQ ID NO: 16044 - RNA, 20 nt, Artificial Sequence
  SAMD9 targeting guide sequence portion
uaucucuaaaaggcaugaac

SEQ ID NO: 16045 - RNA, 20 nt, Artificial Sequence
  SAMD9 targeting guide sequence portion
uaugcagaagcaagggaaaa

SEQ ID NO: 16046 - RNA, 20 nt, Artificial Sequence
  SAMD9 targeting guide sequence portion
uaugcuuuugaaauuuucuc

SEQ ID NO: 16047 - RNA, 20 nt, Artificial Sequence
  SAMD9 targeting guide sequence portion
uauggaguuaaaauuuuaug

SEQ ID NO: 16048 - RNA, 20 nt, Artificial Sequence
  SAMD9 targeting guide sequence portion
uauguaucucuaaaaggcau

SEQ ID NO: 16049 - RNA, 20 nt, Artificial Sequence
  SAMD9 targeting guide sequence portion
uauguuuuuuaaagaguuca

SEQ ID NO: 16050 - RNA, 20 nt, Artificial Sequence
  SAMD9 targeting guide sequence portion
uauuaggcaaucagaaaaau

SEQ ID NO: 16051 - RNA, 20 nt, Artificial Sequence
  SAMD9 targeting guide sequence portion
uauuauugaagauuccaugg

SEQ ID NO: 16052 - RNA, 20 nt, Artificial Sequence
  SAMD9 targeting guide sequence portion
uauugaagauuccaugguua

SEQ ID NO: 16053 - RNA, 20 nt, Artificial Sequence
  SAMD9 targeting guide sequence portion
uauuugaggauauuaaggua

SEQ ID NO: 16054 - RNA, 20 nt, Artificial Sequence
  SAMD9 targeting guide sequence portion
ucaaaagcauaaucaguaag

SEQ ID NO: 16055 - RNA, 20 nt, Artificial Sequence
  SAMD9 targeting guide sequence portion
ucaaaaucucauuagaauuu

SEQ ID NO: 16056 - RNA, 20 nt, Artificial Sequence
  SAMD9 targeting guide sequence portion
ucaaauaucuagucuguguu

SEQ ID NO: 16057 - RNA, 20 nt, Artificial Sequence
  SAMD9 targeting guide sequence portion
ucaaauuuuucugauugccu

SEQ ID NO: 16058 - RNA, 20 nt, Artificial Sequence
  SAMD9 targeting guide sequence portion
ucaauaauauaguaccuuaa

SEQ ID NO: 16059 - RNA, 20 nt, Artificial Sequence
  SAMD9 targeting guide sequence portion
ucaauuagaaaguaacaaua

SEQ ID NO: 16060 - RNA, 20 nt, Artificial Sequence
  SAMD9 targeting guide sequence portion
ucaauuauuaggcaaucaga

SEQ ID NO: 16061 - RNA, 20 nt, Artificial Sequence
  SAMD9 targeting guide sequence portion
ucaccacccccacaccccaa

SEQ ID NO: 16062 - RNA, 20 nt, Artificial Sequence
  SAMD9 targeting guide sequence portion
ucacucuuuauuguuacuuu

SEQ ID NO: 16063 - RNA, 20 nt, Artificial Sequence
  SAMD9 targeting guide sequence portion
ucacuggaggaagauuuucc

SEQ ID NO: 16064 - RNA, 20 nt, Artificial Sequence
  SAMD9 targeting guide sequence portion
ucagaaaaauuugaacacag

SEQ ID NO: 16065 - RNA, 20 nt, Artificial Sequence
  SAMD9 targeting guide sequence portion
ucagcacacuuuucucccuc

SEQ ID NO: 16066 - RNA, 20 nt, Artificial Sequence
  SAMD9 targeting guide sequence portion
ucaggacuaaucuuguuucg

SEQ ID NO: 16067 - RNA, 20 nt, Artificial Sequence
  SAMD9 targeting guide sequence portion
ucaguaagagggagaaaagu

SEQ ID NO: 16068 - RNA, 20 nt, Artificial Sequence
  SAMD9 targeting guide sequence portion
ucaguaauuuuguguuuggg

SEQ ID NO: 16069 - RNA, 20 nt, Artificial Sequence
  SAMD9 targeting guide sequence portion
ucaugccuuuuagagauaca

SEQ ID NO: 16070 - RNA, 20 nt, Artificial Sequence
  SAMD9 targeting guide sequence portion
ucauuagaauuuuuucacug

SEQ ID NO: 16071 - RNA, 20 nt, Artificial Sequence
  SAMD9 targeting guide sequence portion
uccagcuugcagccauuguu

SEQ ID NO: 16072 - RNA, 20 nt, Artificial Sequence
  SAMD9 targeting guide sequence portion
uccagugaaaaaauucuaau

SEQ ID NO: 16073 - RNA, 20 nt, Artificial Sequence
  SAMD9 targeting guide sequence portion
uccauaacuuauaagcucac

SEQ ID NO: 16074 - RNA, 20 nt, Artificial Sequence
  SAMD9 targeting guide sequence portion
uccaugguuauguuuuuuaa

SEQ ID NO: 16075 - RNA, 20 nt, Artificial Sequence
  SAMD9 targeting guide sequence portion
uccauguauccagcuugcag

SEQ ID NO: 16076 - RNA, 20 nt, Artificial Sequence
  SAMD9 targeting guide sequence portion
ucccucuuacugauuaugcu

SEQ ID NO: 16077 - RNA, 20 nt, Artificial Sequence
  SAMD9 targeting guide sequence portion
ucccuugcuucugcauaaaa

SEQ ID NO: 16078 - RNA, 20 nt, Artificial Sequence
  SAMD9 targeting guide sequence portion
ucccuuucaccacccccaca

SEQ ID NO: 16079 - RNA, 20 nt, Artificial Sequence
  SAMD9 targeting guide sequence portion
uccucaaauaucuagucugu

SEQ ID NO: 16080 - RNA, 20 nt, Artificial Sequence
  SAMD9 targeting guide sequence portion
uccuccagugaaaaaauucu

SEQ ID NO: 16081 - RNA, 20 nt, Artificial Sequence
  SAMD9 targeting guide sequence portion
uccugaguuaacaauggcug

SEQ ID NO: 16082 - RNA, 20 nt, Artificial Sequence
  SAMD9 targeting guide sequence portion
ucgguucuacuucccuuuca

SEQ ID NO: 16083 - RNA, 20 nt, Artificial Sequence
  SAMD9 targeting guide sequence portion
ucuaaaaggcaugaacucuu

SEQ ID NO: 16084 - RNA, 20 nt, Artificial Sequence
  SAMD9 targeting guide sequence portion
ucuaaaaucaauuauuaggc

SEQ ID NO: 16085 - RNA, 20 nt, Artificial Sequence
  SAMD9 targeting guide sequence portion
ucuaaugagauuuugaagac

SEQ ID NO: 16086 - RNA, 20 nt, Artificial Sequence
  SAMD9 targeting guide sequence portion
ucuacuucccuuucaccacc

SEQ ID NO: 16087 - RNA, 20 nt, Artificial Sequence
  SAMD9 targeting guide sequence portion
ucuagaaucaguaauuuugu

SEQ ID NO: 16088 - RNA, 20 nt, Artificial Sequence
  SAMD9 targeting guide sequence portion
ucuagaucaugucauuuauu

SEQ ID NO: 16089 - RNA, 20 nt, Artificial Sequence
  SAMD9 targeting guide sequence portion
ucuagucuguguucaaauuu

SEQ ID NO: 16090 - RNA, 20 nt, Artificial Sequence
  SAMD9 targeting guide sequence portion
ucucauuagaauuuuuucac

SEQ ID NO: 16091 - RNA, 20 nt, Artificial Sequence
  SAMD9 targeting guide sequence portion
ucucccucuuacugauuaug

SEQ ID NO: 16092 - RNA, 20 nt, Artificial Sequence
  SAMD9 targeting guide sequence portion
ucucuaaaaggcaugaacuc

SEQ ID NO: 16093 - RNA, 20 nt, Artificial Sequence
  SAMD9 targeting guide sequence portion
ucucuuguaaaacauuuaga

SEQ ID NO: 16094 - RNA, 20 nt, Artificial Sequence
  SAMD9 targeting guide sequence portion
ucugauugccuaauaauuga

SEQ ID NO: 16095 - RNA, 20 nt, Artificial Sequence
  SAMD9 targeting guide sequence portion
ucugcauaaaauuuuaacuc

SEQ ID NO: 16096 - RNA, 20 nt, Artificial Sequence
  SAMD9 targeting guide sequence portion
ucugucuucaaaaucucauu

SEQ ID NO: 16097 - RNA, 20 nt, Artificial Sequence
  SAMD9 targeting guide sequence portion
ucuguguucaaauuuuucug

SEQ ID NO: 16098 - RNA, 20 nt, Artificial Sequence
  SAMD9 targeting guide sequence portion
ucuuacugauuaugcuuuug

SEQ ID NO: 16099 - RNA, 20 nt, Artificial Sequence
  SAMD9 targeting guide sequence portion
ucuuccuccagugaaaaaau

SEQ ID NO: 16100 - RNA, 20 nt, Artificial Sequence
  SAMD9 targeting guide sequence portion
ucuuguuucgguucuacuuc

SEQ ID NO: 16101 - RNA, 20 nt, Artificial Sequence
  SAMD9 targeting guide sequence portion
ucuuuaaaaaacauaaccau

SEQ ID NO: 16102 - RNA, 20 nt, Artificial Sequence
  SAMD9 targeting guide sequence portion
ucuuuauuguuacuuucuaa

SEQ ID NO: 16103 - RNA, 20 nt, Artificial Sequence
  SAMD9 targeting guide sequence portion
ugaaagggaaguagaaccga

SEQ ID NO: 16104 - RNA, 20 nt, Artificial Sequence
  SAMD9 targeting guide sequence portion
ugaacacagacuagauauuu

SEQ ID NO: 16105 - RNA, 20 nt, Artificial Sequence
  SAMD9 targeting guide sequence portion
ugaacucuuuaaaaaacaua

SEQ ID NO: 16106 - RNA, 20 nt, Artificial Sequence
  SAMD9 targeting guide sequence portion
ugaagacagaaacaaaucac

SEQ ID NO: 16107 - RNA, 20 nt, Artificial Sequence
  SAMD9 targeting guide sequence portion
ugaagauuccaugguuaugu

SEQ ID NO: 16108 - RNA, 20 nt, Artificial Sequence
  SAMD9 targeting guide sequence portion
ugaauuccauguauccagcu

SEQ ID NO: 16109 - RNA, 20 nt, Artificial Sequence
  SAMD9 targeting guide sequence portion
ugacaugaucuagaaucagu

SEQ ID NO: 16110 - RNA, 20 nt, Artificial Sequence
  SAMD9 targeting guide sequence portion
ugagauuuugaagacagaaa

SEQ ID NO: 16111 - RNA, 20 nt, Artificial Sequence
  SAMD9 targeting guide sequence portion
ugagcuuauaaguuauggag

SEQ ID NO: 16112 - RNA, 20 nt, Artificial Sequence
  SAMD9 targeting guide sequence portion
ugaggauauuaagguacuau

SEQ ID NO: 16113 - RNA, 20 nt, Artificial Sequence
  SAMD9 targeting guide sequence portion
ugaguuaacaauggcugcaa

SEQ ID NO: 16114 - RNA, 20 nt, Artificial Sequence
  SAMD9 targeting guide sequence portion
ugaucuagaaucaguaauuu

SEQ ID NO: 16115 - RNA, 20 nt, Artificial Sequence
  SAMD9 targeting guide sequence portion
ugauuaugcuuuugaaauuu

SEQ ID NO: 16116 - RNA, 20 nt, Artificial Sequence
  SAMD9 targeting guide sequence portion
ugauucuagaucaugucauu

SEQ ID NO: 16117 - RNA, 20 nt, Artificial Sequence
  SAMD9 targeting guide sequence portion
ugauugccuaauaauugauu

SEQ ID NO: 16118 - RNA, 20 nt, Artificial Sequence
  SAMD9 targeting guide sequence portion
ugauuuguuucugucuucaa

SEQ ID NO: 16119 - RNA, 20 nt, Artificial Sequence
  SAMD9 targeting guide sequence portion
ugcaagcuggauacauggaa

SEQ ID NO: 16120 - RNA, 20 nt, Artificial Sequence
  SAMD9 targeting guide sequence portion
ugcagaagcaagggaaaauc

SEQ ID NO: 16121 - RNA, 20 nt, Artificial Sequence
  SAMD9 targeting guide sequence portion
ugcagccauuguuaacucag

SEQ ID NO: 16122 - RNA, 20 nt, Artificial Sequence
  SAMD9 targeting guide sequence portion
ugcauaaaauuuuaacucca

SEQ ID NO: 16123 - RNA, 20 nt, Artificial Sequence
  SAMD9 targeting guide sequence portion
ugccuaauaauugauuuuag

SEQ ID NO: 16124 - RNA, 20 nt, Artificial Sequence
  SAMD9 targeting guide sequence portion
ugccuuuuagagauacauac

SEQ ID NO: 16125 - RNA, 20 nt, Artificial Sequence
  SAMD9 targeting guide sequence portion
ugcugaauuccauguaucca

SEQ ID NO: 16126 - RNA, 20 nt, Artificial Sequence
  SAMD9 targeting guide sequence portion
ugcuucugcauaaaauuuua

SEQ ID NO: 16127 - RNA, 20 nt, Artificial Sequence
  SAMD9 targeting guide sequence portion
ugcuuuugaaauuuucucuu

SEQ ID NO: 16128 - RNA, 20 nt, Artificial Sequence
  SAMD9 targeting guide sequence portion
uggaaucuucaauaauauag

SEQ ID NO: 16129 - RNA, 20 nt, Artificial Sequence
  SAMD9 targeting guide sequence portion
uggaauucagcacacuuuuc

SEQ ID NO: 16130 - RNA, 20 nt, Artificial Sequence
  SAMD9 targeting guide sequence portion
uggaggaagauuuucccuug

SEQ ID NO: 16131 - RNA, 20 nt, Artificial Sequence
  SAMD9 targeting guide sequence portion
uggaguuaaaauuuuaugca

SEQ ID NO: 16132 - RNA, 20 nt, Artificial Sequence
  SAMD9 targeting guide sequence portion
uggauacauggaauucagca

SEQ ID NO: 16133 - RNA, 20 nt, Artificial Sequence
  SAMD9 targeting guide sequence portion
uggcugcaagcuggauacau

SEQ ID NO: 16134 - RNA, 20 nt, Artificial Sequence
  SAMD9 targeting guide sequence portion
uggggguggugaaagggaag

SEQ ID NO: 16135 - RNA, 20 nt, Artificial Sequence
  SAMD9 targeting guide sequence portion
ugggguguggggguggugaa

SEQ ID NO: 16136 - RNA, 20 nt, Artificial Sequence
  SAMD9 targeting guide sequence portion
uggugaaagggaaguagaac

SEQ ID NO: 16137 - RNA, 20 nt, Artificial Sequence
  SAMD9 targeting guide sequence portion
ugguuauguuuuuuaaagag

SEQ ID NO: 16138 - RNA, 20 nt, Artificial Sequence
  SAMD9 targeting guide sequence portion
uguaaauaaaugacaugauc

SEQ ID NO: 16139 - RNA, 20 nt, Artificial Sequence
  SAMD9 targeting guide sequence portion
uguauccagcuugcagccau

SEQ ID NO: 16140 - RNA, 20 nt, Artificial Sequence
  SAMD9 targeting guide sequence portion
uguaucucuaaaaggcauga

SEQ ID NO: 16141 - RNA, 20 nt, Artificial Sequence
  SAMD9 targeting guide sequence portion
ugucaauuagaaaguaacaa

SEQ ID NO: 16142 - RNA, 20 nt, Artificial Sequence
  SAMD9 targeting guide sequence portion
ugucuucaaaaucucauuag

SEQ ID NO: 16143 - RNA, 20 nt, Artificial Sequence
  SAMD9 targeting guide sequence portion
ugugauuuguuucugucuuc

SEQ ID NO: 16144 - RNA, 20 nt, Artificial Sequence
  SAMD9 targeting guide sequence portion
ugugcugaauuccauguauc

SEQ ID NO: 16145 - RNA, 20 nt, Artificial Sequence
  SAMD9 targeting guide sequence portion
uguggggguggugaaaggga

SEQ ID NO: 16146 - RNA, 20 nt, Artificial Sequence
  SAMD9 targeting guide sequence portion
uguguucaaauuuuucugau

SEQ ID NO: 16147 - RNA, 20 nt, Artificial Sequence
  SAMD9 targeting guide sequence portion
uguguuuggggugugggggu

SEQ ID NO: 16148 - RNA, 20 nt, Artificial Sequence
  SAMD9 targeting guide sequence portion
uguuaacucaggacuaaucu

SEQ ID NO: 16149 - RNA, 20 nt, Artificial Sequence
  SAMD9 targeting guide sequence portion
uguucaaauuuuucugauug

SEQ ID NO: 16150 - RNA, 20 nt, Artificial Sequence
  SAMD9 targeting guide sequence portion
uguuucgguucuacuucccu

SEQ ID NO: 16151 - RNA, 20 nt, Artificial Sequence
  SAMD9 targeting guide sequence portion
uguuucugucuucaaaaucu

SEQ ID NO: 16152 - RNA, 20 nt, Artificial Sequence
  SAMD9 targeting guide sequence portion
uguuuggggugugggggugg

SEQ ID NO: 16153 - RNA, 20 nt, Artificial Sequence
  SAMD9 targeting guide sequence portion
uguuuuacaagagaaaauuu

SEQ ID NO: 16154 - RNA, 20 nt, Artificial Sequence
  SAMD9 targeting guide sequence portion
uguuuucuaaauguuuuaca

SEQ ID NO: 16155 - RNA, 20 nt, Artificial Sequence
  SAMD9 targeting guide sequence portion
uguuuuuuaaagaguucaug

SEQ ID NO: 16156 - RNA, 20 nt, Artificial Sequence
  SAMD9 targeting guide sequence portion
uuaaaaaacauaaccaugga

SEQ ID NO: 16157 - RNA, 20 nt, Artificial Sequence
  SAMD9 targeting guide sequence portion
uuaaaauuuuaugcagaagc

SEQ ID NO: 16158 - RNA, 20 nt, Artificial Sequence
  SAMD9 targeting guide sequence portion
uuaaagaguucaugccuuuu

SEQ ID NO: 16159 - RNA, 20 nt, Artificial Sequence
  SAMD9 targeting guide sequence portion
uuaacaauggcugcaagcug

SEQ ID NO: 16160 - RNA, 20 nt, Artificial Sequence
  SAMD9 targeting guide sequence portion
uuaacucaggacuaaucuug

SEQ ID NO: 16161 - RNA, 20 nt, Artificial Sequence
  SAMD9 targeting guide sequence portion
uuaacuccauaacuuauaag

SEQ ID NO: 16162 - RNA, 20 nt, Artificial Sequence
  SAMD9 targeting guide sequence portion
uuaagguacuauauuauuga

SEQ ID NO: 16163 - RNA, 20 nt, Artificial Sequence
  SAMD9 targeting guide sequence portion
uuaauauccucaaauaucua

SEQ ID NO: 16164 - RNA, 20 nt, Artificial Sequence
  SAMD9 targeting guide sequence portion
uuacaaauacuuuaguaugu

SEQ ID NO: 16165 - RNA, 20 nt, Artificial Sequence
  SAMD9 targeting guide sequence portion
uuacaagagaaaauuucaaa

SEQ ID NO: 16166 - RNA, 20 nt, Artificial Sequence
  SAMD9 targeting guide sequence portion
uuacugauuaugcuuuugaa

SEQ ID NO: 16167 - RNA, 20 nt, Artificial Sequence
  SAMD9 targeting guide sequence portion
uuacugauucuagaucaugu

SEQ ID NO: 16168 - RNA, 20 nt, Artificial Sequence
  SAMD9 targeting guide sequence portion
uuagaaaguaacaauaaaga

SEQ ID NO: 16169 - RNA, 20 nt, Artificial Sequence
  SAMD9 targeting guide sequence portion
uuagaauuuuuucacuggag

SEQ ID NO: 16170 - RNA, 20 nt, Artificial Sequence
  SAMD9 targeting guide sequence portion
uuagagauacauacuaaagu

SEQ ID NO: 16171 - RNA, 20 nt, Artificial Sequence
  SAMD9 targeting guide sequence portion
uuaggcaaucagaaaaauuu

SEQ ID NO: 16172 - RNA, 20 nt, Artificial Sequence
  SAMD9 targeting guide sequence portion
uuaguauguaucucuaaaag

SEQ ID NO: 16173 - RNA, 20 nt, Artificial Sequence
  SAMD9 targeting guide sequence portion
uuaguccugaguuaacaaug

SEQ ID NO: 16174 - RNA, 20 nt, Artificial Sequence
  SAMD9 targeting guide sequence portion
uuauaagcucacucuuuauu

SEQ ID NO: 16175 - RNA, 20 nt, Artificial Sequence
  SAMD9 targeting guide sequence portion
uuaugcagaagcaagggaaa

SEQ ID NO: 16176 - RNA, 20 nt, Artificial Sequence
  SAMD9 targeting guide sequence portion
uuaugcuuuugaaauuuucu

SEQ ID NO: 16177 - RNA, 20 nt, Artificial Sequence
  SAMD9 targeting guide sequence portion
uuauggaguuaaaauuuuau

SEQ ID NO: 16178 - RNA, 20 nt, Artificial Sequence
  SAMD9 targeting guide sequence portion
uuauguuuuuuaaagaguuc

SEQ ID NO: 16179 - RNA, 20 nt, Artificial Sequence
  SAMD9 targeting guide sequence portion
uuauuaggcaaucagaaaaa

SEQ ID NO: 16180 - RNA, 20 nt, Artificial Sequence
  SAMD9 targeting guide sequence portion
uuauugaagauuccaugguu

SEQ ID NO: 16181 - RNA, 20 nt, Artificial Sequence
  SAMD9 targeting guide sequence portion
uucaaaagcauaaucaguaa

SEQ ID NO: 16182 - RNA, 20 nt, Artificial Sequence
  SAMD9 targeting guide sequence portion
uucaaauuuuucugauugcc

SEQ ID NO: 16183 - RNA, 20 nt, Artificial Sequence
  SAMD9 targeting guide sequence portion
uucaauaauauaguaccuua

SEQ ID NO: 16184 - RNA, 20 nt, Artificial Sequence
  SAMD9 targeting guide sequence portion
uucaccacccccacacccca

SEQ ID NO: 16185 - RNA, 20 nt, Artificial Sequence
  SAMD9 targeting guide sequence portion
uucacuggaggaagauuuuc

SEQ ID NO: 16186 - RNA, 20 nt, Artificial Sequence
  SAMD9 targeting guide sequence portion
uucagcacacuuuucucccu

SEQ ID NO: 16187 - RNA, 20 nt, Artificial Sequence
  SAMD9 targeting guide sequence portion
uucaugccuuuuagagauac

SEQ ID NO: 16188 - RNA, 20 nt, Artificial Sequence
  SAMD9 targeting guide sequence portion
uuccaugguuauguuuuuua

SEQ ID NO: 16189 - RNA, 20 nt, Artificial Sequence
  SAMD9 targeting guide sequence portion
uuccauguauccagcuugca

SEQ ID NO: 16190 - RNA, 20 nt, Artificial Sequence
  SAMD9 targeting guide sequence portion
uucccuugcuucugcauaaa

SEQ ID NO: 16191 - RNA, 20 nt, Artificial Sequence
  SAMD9 targeting guide sequence portion
uucccuuucaccacccccac

SEQ ID NO: 16192 - RNA, 20 nt, Artificial Sequence
  SAMD9 targeting guide sequence portion
uuccuccagugaaaaaauuc

SEQ ID NO: 16193 - RNA, 20 nt, Artificial Sequence
  SAMD9 targeting guide sequence portion
uucgguucuacuucccuuuc

SEQ ID NO: 16194 - RNA, 20 nt, Artificial Sequence
  SAMD9 targeting guide sequence portion
uucuaaugagauuuugaaga

SEQ ID NO: 16195 - RNA, 20 nt, Artificial Sequence
  SAMD9 targeting guide sequence portion
uucuacuucccuuucaccac

SEQ ID NO: 16196 - RNA, 20 nt, Artificial Sequence
  SAMD9 targeting guide sequence portion
uucuagaucaugucauuuau

SEQ ID NO: 16197 - RNA, 20 nt, Artificial Sequence
  SAMD9 targeting guide sequence portion
uucucccucuuacugauuau

SEQ ID NO: 16198 - RNA, 20 nt, Artificial Sequence
  SAMD9 targeting guide sequence portion
uucucuuguaaaacauuuag

SEQ ID NO: 16199 - RNA, 20 nt, Artificial Sequence
  SAMD9 targeting guide sequence portion
uucugauugccuaauaauug

SEQ ID NO: 16200 - RNA, 20 nt, Artificial Sequence
  SAMD9 targeting guide sequence portion
uucugcauaaaauuuuaacu

SEQ ID NO: 16201 - RNA, 20 nt, Artificial Sequence
  SAMD9 targeting guide sequence portion
uucugucuucaaaaucucau

SEQ ID NO: 16202 - RNA, 20 nt, Artificial Sequence
  SAMD9 targeting guide sequence portion
uugaacacagacuagauauu

SEQ ID NO: 16203 - RNA, 20 nt, Artificial Sequence
  SAMD9 targeting guide sequence portion
uugaagacagaaacaaauca

SEQ ID NO: 16204 - RNA, 20 nt, Artificial Sequence
  SAMD9 targeting guide sequence portion
uugaagauuccaugguuaug

SEQ ID NO: 16205 - RNA, 20 nt, Artificial Sequence
  SAMD9 targeting guide sequence portion
uugaggauauuaagguacua

SEQ ID NO: 16206 - RNA, 20 nt, Artificial Sequence
  SAMD9 targeting guide sequence portion
uugcagccauuguuaacuca

SEQ ID NO: 16207 - RNA, 20 nt, Artificial Sequence
  SAMD9 targeting guide sequence portion
uugcuucugcauaaaauuuu

SEQ ID NO: 16208 - RNA, 20 nt, Artificial Sequence
  SAMD9 targeting guide sequence portion
uuggggugugggggugguga

SEQ ID NO: 16209 - RNA, 20 nt, Artificial Sequence
  SAMD9 targeting guide sequence portion
uuguaaauaaaugacaugau

SEQ ID NO: 16210 - RNA, 20 nt, Artificial Sequence
  SAMD9 targeting guide sequence portion
uugucaauuagaaaguaaca

SEQ ID NO: 16211 - RNA, 20 nt, Artificial Sequence
  SAMD9 targeting guide sequence portion
uuguguuugggguguggggg

SEQ ID NO: 16212 - RNA, 20 nt, Artificial Sequence
  SAMD9 targeting guide sequence portion
uuguuaacucaggacuaauc

SEQ ID NO: 16213 - RNA, 20 nt, Artificial Sequence
  SAMD9 targeting guide sequence portion
uuguuucgguucuacuuccc

SEQ ID NO: 16214 - RNA, 20 nt, Artificial Sequence
  SAMD9 targeting guide sequence portion
uuguuucugucuucaaaauc

SEQ ID NO: 16215 - RNA, 20 nt, Artificial Sequence
  SAMD9 targeting guide sequence portion
uuguuuucuaaauguuuuac

SEQ ID NO: 16216 - RNA, 20 nt, Artificial Sequence
  SAMD9 targeting guide sequence portion
uuuaaaaaacauaaccaugg

SEQ ID NO: 16217 - RNA, 20 nt, Artificial Sequence
  SAMD9 targeting guide sequence portion
uuuaaagaguucaugccuuu

SEQ ID NO: 16218 - RNA, 20 nt, Artificial Sequence
  SAMD9 targeting guide sequence portion
uuuaacuccauaacuuauaa

SEQ ID NO: 16219 - RNA, 20 nt, Artificial Sequence
  SAMD9 targeting guide sequence portion
uuuacaaauacuuuaguaug

SEQ ID NO: 16220 - RNA, 20 nt, Artificial Sequence
  SAMD9 targeting guide sequence portion
uuuacaagagaaaauuucaa

SEQ ID NO: 16221 - RNA, 20 nt, Artificial Sequence
  SAMD9 targeting guide sequence portion
uuuagagauacauacuaaag

SEQ ID NO: 16222 - RNA, 20 nt, Artificial Sequence
  SAMD9 targeting guide sequence portion
uuuaguauguaucucuaaaa

SEQ ID NO: 16223 - RNA, 20 nt, Artificial Sequence
  SAMD9 targeting guide sequence portion
uuuaugcagaagcaagggaa

SEQ ID NO: 16224 - RNA, 20 nt, Artificial Sequence
  SAMD9 targeting guide sequence portion
uuucaaaagcauaaucagua

SEQ ID NO: 16225 - RNA, 20 nt, Artificial Sequence
  SAMD9 targeting guide sequence portion
uuucaccacccccacacccc

SEQ ID NO: 16226 - RNA, 20 nt, Artificial Sequence
  SAMD9 targeting guide sequence portion
uuucacuggaggaagauuuu

SEQ ID NO: 16227 - RNA, 20 nt, Artificial Sequence
  SAMD9 targeting guide sequence portion
uuucccuugcuucugcauaa

SEQ ID NO: 16228 - RNA, 20 nt, Artificial Sequence
  SAMD9 targeting guide sequence portion
uuucgguucuacuucccuuu

SEQ ID NO: 16229 - RNA, 20 nt, Artificial Sequence
  SAMD9 targeting guide sequence portion
uuucucccucuuacugauua

SEQ ID NO: 16230 - RNA, 20 nt, Artificial Sequence
  SAMD9 targeting guide sequence portion
uuucucuuguaaaacauuua

SEQ ID NO: 16231 - RNA, 20 nt, Artificial Sequence
  SAMD9 targeting guide sequence portion
uuucugauugccuaauaauu

SEQ ID NO: 16232 - RNA, 20 nt, Artificial Sequence
  SAMD9 targeting guide sequence portion
uuucugucuucaaaaucuca

SEQ ID NO: 16233 - RNA, 20 nt, Artificial Sequence
  SAMD9 targeting guide sequence portion
uuugaacacagacuagauau

SEQ ID NO: 16234 - RNA, 20 nt, Artificial Sequence
  SAMD9 targeting guide sequence portion
uuugaagacagaaacaaauc

SEQ ID NO: 16235 - RNA, 20 nt, Artificial Sequence
  SAMD9 targeting guide sequence portion
uuugaggauauuaagguacu

SEQ ID NO: 16236 - RNA, 20 nt, Artificial Sequence
  SAMD9 targeting guide sequence portion
uuugggguguggggguggug

SEQ ID NO: 16237 - RNA, 20 nt, Artificial Sequence
  SAMD9 targeting guide sequence portion
uuuguaaauaaaugacauga

SEQ ID NO: 16238 - RNA, 20 nt, Artificial Sequence
  SAMD9 targeting guide sequence portion
uuuguguuuggggugugggg

SEQ ID NO: 16239 - RNA, 20 nt, Artificial Sequence
  SAMD9 targeting guide sequence portion
uuuguuucugucuucaaaau

SEQ ID NO: 16240 - RNA, 20 nt, Artificial Sequence
  SAMD9 targeting guide sequence portion
uuuguuuucuaaauguuuua

SEQ ID NO: 16241 - RNA, 20 nt, Artificial Sequence
  SAMD9 targeting guide sequence portion
uuuuaaagaguucaugccuu

SEQ ID NO: 16242 - RNA, 20 nt, Artificial Sequence
  SAMD9 targeting guide sequence portion
uuuuaacuccauaacuuaua

SEQ ID NO: 16243 - RNA, 20 nt, Artificial Sequence
  SAMD9 targeting guide sequence portion
uuuuacaagagaaaauuuca

SEQ ID NO: 16244 - RNA, 20 nt, Artificial Sequence
  SAMD9 targeting guide sequence portion
uuuuaugcagaagcaaggga

SEQ ID NO: 16245 - RNA, 20 nt, Artificial Sequence
  SAMD9 targeting guide sequence portion
uuuucacuggaggaagauuu

SEQ ID NO: 16246 - RNA, 20 nt, Artificial Sequence
  SAMD9 targeting guide sequence portion
uuuucccuugcuucugcaua

SEQ ID NO: 16247 - RNA, 20 nt, Artificial Sequence
  SAMD9 targeting guide sequence portion
uuuucucccucuuacugauu

SEQ ID NO: 16248 - RNA, 20 nt, Artificial Sequence
  SAMD9 targeting guide sequence portion
uuuucugauugccuaauaau

SEQ ID NO: 16249 - RNA, 20 nt, Artificial Sequence
  SAMD9 targeting guide sequence portion
uuuugaagacagaaacaaau

SEQ ID NO: 16250 - RNA, 20 nt, Artificial Sequence
  SAMD9 targeting guide sequence portion
uuuuguguuugggguguggg

SEQ ID NO: 16251 - RNA, 20 nt, Artificial Sequence
  SAMD9 targeting guide sequence portion
uuuuuaaagaguucaugccu

SEQ ID NO: 16252 - RNA, 20 nt, Artificial Sequence
  SAMD9 targeting guide sequence portion
uuuuucacuggaggaagauu

SEQ ID NO: 16253 - RNA, 20 nt, Artificial Sequence
  SAMD9 targeting guide sequence portion
uuuuucugauugccuaauaa

SEQ ID NO: 16254 - RNA, 20 nt, Artificial Sequence
  SAMD9 targeting guide sequence portion
uuuuuuaaagaguucaugcc

SEQ ID NO: 16255 - RNA, 20 nt, Artificial Sequence
  SAMD9 targeting guide sequence portion
uuuuuucacuggaggaagau

SEQ ID NO: 16256 - RNA, 21 nt, Artificial Sequence
  SAMD9 targeting guide sequence portion
aaaaaacauaaccauggaauc

SEQ ID NO: 16257 - RNA, 21 nt, Artificial Sequence
  SAMD9 targeting guide sequence portion
aaaaaaugugauuuguuucug

SEQ ID NO: 16258 - RNA, 21 nt, Artificial Sequence
  SAMD9 targeting guide sequence portion
aaaaaauucuaaugagauuuu

SEQ ID NO: 16259 - RNA, 21 nt, Artificial Sequence
  SAMD9 targeting guide sequence portion
aaaaacauaaccauggaaucu

SEQ ID NO: 16260 - RNA, 21 nt, Artificial Sequence
  SAMD9 targeting guide sequence portion
aaaaaugugauuuguuucugu

SEQ ID NO: 16261 - RNA, 21 nt, Artificial Sequence
  SAMD9 targeting guide sequence portion
aaaaauucuaaugagauuuug

SEQ ID NO: 16262 - RNA, 21 nt, Artificial Sequence
  SAMD9 targeting guide sequence portion
aaaaauuugaacacagacuag

SEQ ID NO: 16263 - RNA, 21 nt, Artificial Sequence
  SAMD9 targeting guide sequence portion
aaaacauaaccauggaaucuu

SEQ ID NO: 16264 - RNA, 21 nt, Artificial Sequence
  SAMD9 targeting guide sequence portion
aaaagcauaaucaguaagagg

SEQ ID NO: 16265 - RNA, 21 nt, Artificial Sequence
  SAMD9 targeting guide sequence portion
aaaaggcaugaacucuuuaaa

SEQ ID NO: 16266 - RNA, 21 nt, Artificial Sequence
  SAMD9 targeting guide sequence portion
aaaagugugcugaauuccaug

SEQ ID NO: 16267 - RNA, 21 nt, Artificial Sequence
  SAMD9 targeting guide sequence portion
aaaaucaauuauuaggcaauc

SEQ ID NO: 16268 - RNA, 21 nt, Artificial Sequence
  SAMD9 targeting guide sequence portion
aaaaucucauuagaauuuuuu

SEQ ID NO: 16269 - RNA, 21 nt, Artificial Sequence
  SAMD9 targeting guide sequence portion
aaaaucuuccuccagugaaaa

SEQ ID NO: 16270 - RNA, 21 nt, Artificial Sequence
  SAMD9 targeting guide sequence portion
aaaaugugauuuguuucuguc

SEQ ID NO: 16271 - RNA, 21 nt, Artificial Sequence
  SAMD9 targeting guide sequence portion
aaaauuacugauucuagauca

SEQ ID NO: 16272 - RNA, 21 nt, Artificial Sequence
  SAMD9 targeting guide sequence portion
aaaauucuaaugagauuuuga

SEQ ID NO: 16273 - RNA, 21 nt, Artificial Sequence
  SAMD9 targeting guide sequence portion
aaaauuucaaaagcauaauca

SEQ ID NO: 16274 - RNA, 21 nt, Artificial Sequence
  SAMD9 targeting guide sequence portion
aaaauuugaacacagacuaga

SEQ ID NO: 16275 - RNA, 21 nt, Artificial Sequence
  SAMD9 targeting guide sequence portion
aaaauuuuaacuccauaacuu

SEQ ID NO: 16276 - RNA, 21 nt, Artificial Sequence
  SAMD9 targeting guide sequence portion
aaaauuuuaugcagaagcaag

SEQ ID NO: 16277 - RNA, 21 nt, Artificial Sequence
  SAMD9 targeting guide sequence portion
aaacaagauuaguccugaguu

SEQ ID NO: 16278 - RNA, 21 nt, Artificial Sequence
  SAMD9 targeting guide sequence portion
aaacacaaaauuacugauucu

SEQ ID NO: 16279 - RNA, 21 nt, Artificial Sequence
  SAMD9 targeting guide sequence portion
aaacauaaccauggaaucuuc

SEQ ID NO: 16280 - RNA, 21 nt, Artificial Sequence
  SAMD9 targeting guide sequence portion
aaagagugagcuuauaaguua

SEQ ID NO: 16281 - RNA, 21 nt, Artificial Sequence
  SAMD9 targeting guide sequence portion
aaagaguucaugccuuuuaga

SEQ ID NO: 16282 - RNA, 21 nt, Artificial Sequence
  SAMD9 targeting guide sequence portion
aaagcauaaucaguaagaggg

SEQ ID NO: 16283 - RNA, 21 nt, Artificial Sequence
  SAMD9 targeting guide sequence portion
aaaggcaugaacucuuuaaaa

SEQ ID NO: 16284 - RNA, 21 nt, Artificial Sequence
  SAMD9 targeting guide sequence portion
aaagggaaguagaaccgaaac

SEQ ID NO: 16285 - RNA, 21 nt, Artificial Sequence
  SAMD9 targeting guide sequence portion
aaaguaacaauaaagagugag

SEQ ID NO: 16286 - RNA, 21 nt, Artificial Sequence
  SAMD9 targeting guide sequence portion
aaagugugcugaauuccaugu

SEQ ID NO: 16287 - RNA, 21 nt, Artificial Sequence
  SAMD9 targeting guide sequence portion
aaauaaaugacaugaucuaga

SEQ ID NO: 16288 - RNA, 21 nt, Artificial Sequence
  SAMD9 targeting guide sequence portion
aaauacuuuaguauguaucuc

SEQ ID NO: 16289 - RNA, 21 nt, Artificial Sequence
  SAMD9 targeting guide sequence portion
aaauaucuagucuguguucaa

SEQ ID NO: 16290 - RNA, 21 nt, Artificial Sequence
  SAMD9 targeting guide sequence portion
aaaucaauuauuaggcaauca

SEQ ID NO: 16291 - RNA, 21 nt, Artificial Sequence
  SAMD9 targeting guide sequence portion
aaaucuaaaaucaauuauuag

SEQ ID NO: 16292 - RNA, 21 nt, Artificial Sequence
  SAMD9 targeting guide sequence portion
aaaucucauuagaauuuuuuc

SEQ ID NO: 16293 - RNA, 21 nt, Artificial Sequence
  SAMD9 targeting guide sequence portion
aaaucuuccuccagugaaaaa

SEQ ID NO: 16294 - RNA, 21 nt, Artificial Sequence
  SAMD9 targeting guide sequence portion
aaaugacaugaucuagaauca

SEQ ID NO: 16295 - RNA, 21 nt, Artificial Sequence
  SAMD9 targeting guide sequence portion
aaaugugauuuguuucugucu

SEQ ID NO: 16296 - RNA, 21 nt, Artificial Sequence
  SAMD9 targeting guide sequence portion
aaauuacugauucuagaucau

SEQ ID NO: 16297 - RNA, 21 nt, Artificial Sequence
  SAMD9 targeting guide sequence portion
aaauucuaaugagauuuugaa

SEQ ID NO: 16298 - RNA, 21 nt, Artificial Sequence
  SAMD9 targeting guide sequence portion
aaauuucaaaagcauaaucag

SEQ ID NO: 16299 - RNA, 21 nt, Artificial Sequence
  SAMD9 targeting guide sequence portion
aaauuugaacacagacuagau

SEQ ID NO: 16300 - RNA, 21 nt, Artificial Sequence
  SAMD9 targeting guide sequence portion
aaauuuuaacuccauaacuua

SEQ ID NO: 16301 - RNA, 21 nt, Artificial Sequence
  SAMD9 targeting guide sequence portion
aaauuuuaugcagaagcaagg

SEQ ID NO: 16302 - RNA, 21 nt, Artificial Sequence
  SAMD9 targeting guide sequence portion
aaauuuuucugauugccuaau

SEQ ID NO: 16303 - RNA, 21 nt, Artificial Sequence
  SAMD9 targeting guide sequence portion
aacaagauuaguccugaguua

SEQ ID NO: 16304 - RNA, 21 nt, Artificial Sequence
  SAMD9 targeting guide sequence portion
aacaauaaagagugagcuuau

SEQ ID NO: 16305 - RNA, 21 nt, Artificial Sequence
  SAMD9 targeting guide sequence portion
aacaauggcugcaagcuggau

SEQ ID NO: 16306 - RNA, 21 nt, Artificial Sequence
  SAMD9 targeting guide sequence portion
aacacaaaauuacugauucua

SEQ ID NO: 16307 - RNA, 21 nt, Artificial Sequence
  SAMD9 targeting guide sequence portion
aacacagacuagauauuugag

SEQ ID NO: 16308 - RNA, 21 nt, Artificial Sequence
  SAMD9 targeting guide sequence portion
aacauaaccauggaaucuuca

SEQ ID NO: 16309 - RNA, 21 nt, Artificial Sequence
  SAMD9 targeting guide sequence portion
aaccauggaaucuucaauaau

SEQ ID NO: 16310 - RNA, 21 nt, Artificial Sequence
  SAMD9 targeting guide sequence portion
aaccgaaacaagauuaguccu

SEQ ID NO: 16311 - RNA, 21 nt, Artificial Sequence
  SAMD9 targeting guide sequence portion
aacucaggacuaaucuuguuu

SEQ ID NO: 16312 - RNA, 21 nt, Artificial Sequence
  SAMD9 targeting guide sequence portion
aacuccauaacuuauaagcuc

SEQ ID NO: 16313 - RNA, 21 nt, Artificial Sequence
  SAMD9 targeting guide sequence portion
aacucuuuaaaaaacauaacc

SEQ ID NO: 16314 - RNA, 21 nt, Artificial Sequence
  SAMD9 targeting guide sequence portion
aacuuauaagcucacucuuua

SEQ ID NO: 16315 - RNA, 21 nt, Artificial Sequence
  SAMD9 targeting guide sequence portion
aagagaaaauuucaaaagcau

SEQ ID NO: 16316 - RNA, 21 nt, Artificial Sequence
  SAMD9 targeting guide sequence portion
aagagggagaaaagugugcug

SEQ ID NO: 16317 - RNA, 21 nt, Artificial Sequence
  SAMD9 targeting guide sequence portion
aagagugagcuuauaaguuau

SEQ ID NO: 16318 - RNA, 21 nt, Artificial Sequence
  SAMD9 targeting guide sequence portion
aagaguucaugccuuuuagag

SEQ ID NO: 16319 - RNA, 21 nt, Artificial Sequence
  SAMD9 targeting guide sequence portion
aagauuaguccugaguuaaca

SEQ ID NO: 16320 - RNA, 21 nt, Artificial Sequence
  SAMD9 targeting guide sequence portion
aagauuccaugguuauguuuu

SEQ ID NO: 16321 - RNA, 21 nt, Artificial Sequence
  SAMD9 targeting guide sequence portion
aagauuuucccuugcuucugc

SEQ ID NO: 16322 - RNA, 21 nt, Artificial Sequence
  SAMD9 targeting guide sequence portion
aagcaagggaaaaucuuccuc

SEQ ID NO: 16323 - RNA, 21 nt, Artificial Sequence
  SAMD9 targeting guide sequence portion
aagcauaaucaguaagaggga

SEQ ID NO: 16324 - RNA, 21 nt, Artificial Sequence
  SAMD9 targeting guide sequence portion
aagcucacucuuuauuguuac

SEQ ID NO: 16325 - RNA, 21 nt, Artificial Sequence
  SAMD9 targeting guide sequence portion
aagcuggauacauggaauuca

SEQ ID NO: 16326 - RNA, 21 nt, Artificial Sequence
  SAMD9 targeting guide sequence portion
aaggcaugaacucuuuaaaaa

SEQ ID NO: 16327 - RNA, 21 nt, Artificial Sequence
  SAMD9 targeting guide sequence portion
aagggaaaaucuuccuccagu

SEQ ID NO: 16328 - RNA, 21 nt, Artificial Sequence
  SAMD9 targeting guide sequence portion
aagggaaguagaaccgaaaca

SEQ ID NO: 16329 - RNA, 21 nt, Artificial Sequence
  SAMD9 targeting guide sequence portion
aagguacuauauuauugaaga

SEQ ID NO: 16330 - RNA, 21 nt, Artificial Sequence
  SAMD9 targeting guide sequence portion
aaguaacaauaaagagugagc

SEQ ID NO: 16331 - RNA, 21 nt, Artificial Sequence
  SAMD9 targeting guide sequence portion
aaguagaaccgaaacaagauu

SEQ ID NO: 16332 - RNA, 21 nt, Artificial Sequence
  SAMD9 targeting guide sequence portion
aaguauuuguaaauaaaugac

SEQ ID NO: 16333 - RNA, 21 nt, Artificial Sequence
  SAMD9 targeting guide sequence portion
aagugugcugaauuccaugua

SEQ ID NO: 16334 - RNA, 21 nt, Artificial Sequence
  SAMD9 targeting guide sequence portion
aaguuauggaguuaaaauuuu

SEQ ID NO: 16335 - RNA, 21 nt, Artificial Sequence
  SAMD9 targeting guide sequence portion
aauaaagagugagcuuauaag

SEQ ID NO: 16336 - RNA, 21 nt, Artificial Sequence
  SAMD9 targeting guide sequence portion
aauaaaugacaugaucuagaa

SEQ ID NO: 16337 - RNA, 21 nt, Artificial Sequence
  SAMD9 targeting guide sequence portion
aauaauauaguaccuuaauau

SEQ ID NO: 16338 - RNA, 21 nt, Artificial Sequence
  SAMD9 targeting guide sequence portion
aauacuuuaguauguaucucu

SEQ ID NO: 16339 - RNA, 21 nt, Artificial Sequence
  SAMD9 targeting guide sequence portion
aauauaguaccuuaauauccu

SEQ ID NO: 16340 - RNA, 21 nt, Artificial Sequence
  SAMD9 targeting guide sequence portion
aauauccucaaauaucuaguc

SEQ ID NO: 16341 - RNA, 21 nt, Artificial Sequence
  SAMD9 targeting guide sequence portion
aauaucuagucuguguucaaa

SEQ ID NO: 16342 - RNA, 21 nt, Artificial Sequence
  SAMD9 targeting guide sequence portion
aaucaauuauuaggcaaucag

SEQ ID NO: 16343 - RNA, 21 nt, Artificial Sequence
  SAMD9 targeting guide sequence portion
aaucagaaaaauuugaacaca

SEQ ID NO: 16344 - RNA, 21 nt, Artificial Sequence
  SAMD9 targeting guide sequence portion
aaucaguaagagggagaaaag

SEQ ID NO: 16345 - RNA, 21 nt, Artificial Sequence
  SAMD9 targeting guide sequence portion
aaucaguaauuuuguguuugg

SEQ ID NO: 16346 - RNA, 21 nt, Artificial Sequence
  SAMD9 targeting guide sequence portion
aaucuaaaaucaauuauuagg

SEQ ID NO: 16347 - RNA, 21 nt, Artificial Sequence
  SAMD9 targeting guide sequence portion
aaucucauuagaauuuuuuca

SEQ ID NO: 16348 - RNA, 21 nt, Artificial Sequence
  SAMD9 targeting guide sequence portion
aaucuuccuccagugaaaaaa

SEQ ID NO: 16349 - RNA, 21 nt, Artificial Sequence
  SAMD9 targeting guide sequence portion
aaucuuguuucgguucuacuu

SEQ ID NO: 16350 - RNA, 21 nt, Artificial Sequence
  SAMD9 targeting guide sequence portion
aaugacaugaucuagaaucag

SEQ ID NO: 16351 - RNA, 21 nt, Artificial Sequence
  SAMD9 targeting guide sequence portion
aaugagauuuugaagacagaa

SEQ ID NO: 16352 - RNA, 21 nt, Artificial Sequence
  SAMD9 targeting guide sequence portion
aauggcugcaagcuggauaca

SEQ ID NO: 16353 - RNA, 21 nt, Artificial Sequence
  SAMD9 targeting guide sequence portion
aaugugauuuguuucugucuu

SEQ ID NO: 16354 - RNA, 21 nt, Artificial Sequence
  SAMD9 targeting guide sequence portion
aauuacugauucuagaucaug

SEQ ID NO: 16355 - RNA, 21 nt, Artificial Sequence
  SAMD9 targeting guide sequence portion
aauuagaaaguaacaauaaag

SEQ ID NO: 16356 - RNA, 21 nt, Artificial Sequence
  SAMD9 targeting guide sequence portion
aauuauuaggcaaucagaaaa

SEQ ID NO: 16357 - RNA, 21 nt, Artificial Sequence
  SAMD9 targeting guide sequence portion
aauucagcacacuuuucuccc

SEQ ID NO: 16358 - RNA, 21 nt, Artificial Sequence
  SAMD9 targeting guide sequence portion
aauuccauguauccagcuugc

SEQ ID NO: 16359 - RNA, 21 nt, Artificial Sequence
  SAMD9 targeting guide sequence portion
aauucuaaugagauuuugaag

SEQ ID NO: 16360 - RNA, 21 nt, Artificial Sequence
  SAMD9 targeting guide sequence portion
aauuucaaaagcauaaucagu

SEQ ID NO: 16361 - RNA, 21 nt, Artificial Sequence
  SAMD9 targeting guide sequence portion
aauuugaacacagacuagaua

SEQ ID NO: 16362 - RNA, 21 nt, Artificial Sequence
  SAMD9 targeting guide sequence portion
aauuuuaacuccauaacuuau

SEQ ID NO: 16363 - RNA, 21 nt, Artificial Sequence
  SAMD9 targeting guide sequence portion
aauuuuaugcagaagcaaggg

SEQ ID NO: 16364 - RNA, 21 nt, Artificial Sequence
  SAMD9 targeting guide sequence portion
aauuuuguguuuggggugugg

SEQ ID NO: 16365 - RNA, 21 nt, Artificial Sequence
  SAMD9 targeting guide sequence portion
aauuuuucugauugccuaaua

SEQ ID NO: 16366 - RNA, 21 nt, Artificial Sequence
  SAMD9 targeting guide sequence portion
aauuuuuucacuggaggaaga

SEQ ID NO: 16367 - RNA, 21 nt, Artificial Sequence
  SAMD9 targeting guide sequence portion
acaaaauuacugauucuagau

SEQ ID NO: 16368 - RNA, 21 nt, Artificial Sequence
  SAMD9 targeting guide sequence portion
acaaauacuuuaguauguauc

SEQ ID NO: 16369 - RNA, 21 nt, Artificial Sequence
  SAMD9 targeting guide sequence portion
acaagagaaaauuucaaaagc

SEQ ID NO: 16370 - RNA, 21 nt, Artificial Sequence
  SAMD9 targeting guide sequence portion
acaagauuaguccugaguuaa

SEQ ID NO: 16371 - RNA, 21 nt, Artificial Sequence
  SAMD9 targeting guide sequence portion
acaauaaagagugagcuuaua

SEQ ID NO: 16372 - RNA, 21 nt, Artificial Sequence
  SAMD9 targeting guide sequence portion
acaauggcugcaagcuggaua

SEQ ID NO: 16373 - RNA, 21 nt, Artificial Sequence
  SAMD9 targeting guide sequence portion
acacaaaauuacugauucuag

SEQ ID NO: 16374 - RNA, 21 nt, Artificial Sequence
  SAMD9 targeting guide sequence portion
acacagacuagauauuugagg

SEQ ID NO: 16375 - RNA, 21 nt, Artificial Sequence
  SAMD9 targeting guide sequence portion
acaccccaaacacaaaauuac

SEQ ID NO: 16376 - RNA, 21 nt, Artificial Sequence
  SAMD9 targeting guide sequence portion
acacuuuucucccucuuacug

SEQ ID NO: 16377 - RNA, 21 nt, Artificial Sequence
  SAMD9 targeting guide sequence portion
acagacuagauauuugaggau

SEQ ID NO: 16378 - RNA, 21 nt, Artificial Sequence
  SAMD9 targeting guide sequence portion
acauaaccauggaaucuucaa

SEQ ID NO: 16379 - RNA, 21 nt, Artificial Sequence
  SAMD9 targeting guide sequence portion
acaugaucuagaaucaguaau

SEQ ID NO: 16380 - RNA, 21 nt, Artificial Sequence
  SAMD9 targeting guide sequence portion
acauggaauucagcacacuuu

SEQ ID NO: 16381 - RNA, 21 nt, Artificial Sequence
  SAMD9 targeting guide sequence portion
accacccccacaccccaaaca

SEQ ID NO: 16382 - RNA, 21 nt, Artificial Sequence
  SAMD9 targeting guide sequence portion
accauggaaucuucaauaaua

SEQ ID NO: 16383 - RNA, 21 nt, Artificial Sequence
  SAMD9 targeting guide sequence portion
accccaaacacaaaauuacug

SEQ ID NO: 16384 - RNA, 21 nt, Artificial Sequence
  SAMD9 targeting guide sequence portion
acccccacaccccaaacacaa

SEQ ID NO: 16385 - RNA, 21 nt, Artificial Sequence
  SAMD9 targeting guide sequence portion
accgaaacaagauuaguccug

SEQ ID NO: 16386 - RNA, 21 nt, Artificial Sequence
  SAMD9 targeting guide sequence portion
accuuaauauccucaaauauc

SEQ ID NO: 16387 - RNA, 21 nt, Artificial Sequence
  SAMD9 targeting guide sequence portion
acuaaucuuguuucgguucua

SEQ ID NO: 16388 - RNA, 21 nt, Artificial Sequence
  SAMD9 targeting guide sequence portion
acuagauauuugaggauauua

SEQ ID NO: 16389 - RNA, 21 nt, Artificial Sequence
  SAMD9 targeting guide sequence portion
acuauauuauugaagauucca

SEQ ID NO: 16390 - RNA, 21 nt, Artificial Sequence
  SAMD9 targeting guide sequence portion
acucaggacuaaucuuguuuc

SEQ ID NO: 16391 - RNA, 21 nt, Artificial Sequence
  SAMD9 targeting guide sequence portion
acuccauaacuuauaagcuca

SEQ ID NO: 16392 - RNA, 21 nt, Artificial Sequence
  SAMD9 targeting guide sequence portion
acucuuuaaaaaacauaacca

SEQ ID NO: 16393 - RNA, 21 nt, Artificial Sequence
  SAMD9 targeting guide sequence portion
acucuuuauuguuacuuucua

SEQ ID NO: 16394 - RNA, 21 nt, Artificial Sequence
  SAMD9 targeting guide sequence portion
acugauuaugcuuuugaaauu

SEQ ID NO: 16395 - RNA, 21 nt, Artificial Sequence
  SAMD9 targeting guide sequence portion
acugauucuagaucaugucau

SEQ ID NO: 16396 - RNA, 21 nt, Artificial Sequence
  SAMD9 targeting guide sequence portion
acuggaggaagauuuucccuu

SEQ ID NO: 16397 - RNA, 21 nt, Artificial Sequence
  SAMD9 targeting guide sequence portion
acuuauaagcucacucuuuau

SEQ ID NO: 16398 - RNA, 21 nt, Artificial Sequence
  SAMD9 targeting guide sequence portion
acuucccuuucaccaccccca

SEQ ID NO: 16399 - RNA, 21 nt, Artificial Sequence
  SAMD9 targeting guide sequence portion
acuuuaguauguaucucuaaa

SEQ ID NO: 16400 - RNA, 21 nt, Artificial Sequence
  SAMD9 targeting guide sequence portion
acuuuucucccucuuacugau

SEQ ID NO: 16401 - RNA, 21 nt, Artificial Sequence
  SAMD9 targeting guide sequence portion
agaaaaauuugaacacagacu

SEQ ID NO: 16402 - RNA, 21 nt, Artificial Sequence
  SAMD9 targeting guide sequence portion
agaaaagugugcugaauucca

SEQ ID NO: 16403 - RNA, 21 nt, Artificial Sequence
  SAMD9 targeting guide sequence portion
agaaaauuucaaaagcauaau

SEQ ID NO: 16404 - RNA, 21 nt, Artificial Sequence
  SAMD9 targeting guide sequence portion
agaaaguaacaauaaagagug

SEQ ID NO: 16405 - RNA, 21 nt, Artificial Sequence
  SAMD9 targeting guide sequence portion
agaaccgaaacaagauuaguc

SEQ ID NO: 16406 - RNA, 21 nt, Artificial Sequence
  SAMD9 targeting guide sequence portion
agaagcaagggaaaaucuucc

SEQ ID NO: 16407 - RNA, 21 nt, Artificial Sequence
  SAMD9 targeting guide sequence portion
agaaucaguaauuuuguguuu

SEQ ID NO: 16408 - RNA, 21 nt, Artificial Sequence
  SAMD9 targeting guide sequence portion
agaauuuuuucacuggaggaa

SEQ ID NO: 16409 - RNA, 21 nt, Artificial Sequence
  SAMD9 targeting guide sequence portion
agacuagauauuugaggauau

SEQ ID NO: 16410 - RNA, 21 nt, Artificial Sequence
  SAMD9 targeting guide sequence portion
agagaaaauuucaaaagcaua

SEQ ID NO: 16411 - RNA, 21 nt, Artificial Sequence
  SAMD9 targeting guide sequence portion
agagauacauacuaaaguauu

SEQ ID NO: 16412 - RNA, 21 nt, Artificial Sequence
  SAMD9 targeting guide sequence portion
agagggagaaaagugugcuga

SEQ ID NO: 16413 - RNA, 21 nt, Artificial Sequence
  SAMD9 targeting guide sequence portion
agagugagcuuauaaguuaug

SEQ ID NO: 16414 - RNA, 21 nt, Artificial Sequence
  SAMD9 targeting guide sequence portion
agaguucaugccuuuuagaga

SEQ ID NO: 16415 - RNA, 21 nt, Artificial Sequence
  SAMD9 targeting guide sequence portion
agauauuugaggauauuaagg

SEQ ID NO: 16416 - RNA, 21 nt, Artificial Sequence
  SAMD9 targeting guide sequence portion
agaucaugucauuuauuuaca

SEQ ID NO: 16417 - RNA, 21 nt, Artificial Sequence
  SAMD9 targeting guide sequence portion
agauuaguccugaguuaacaa

SEQ ID NO: 16418 - RNA, 21 nt, Artificial Sequence
  SAMD9 targeting guide sequence portion
agauuccaugguuauguuuuu

SEQ ID NO: 16419 - RNA, 21 nt, Artificial Sequence
  SAMD9 targeting guide sequence portion
agauuuucccuugcuucugca

SEQ ID NO: 16420 - RNA, 21 nt, Artificial Sequence
  SAMD9 targeting guide sequence portion
agauuuugaagacagaaacaa

SEQ ID NO: 16421 - RNA, 21 nt, Artificial Sequence
  SAMD9 targeting guide sequence portion
agcaagggaaaaucuuccucc

SEQ ID NO: 16422 - RNA, 21 nt, Artificial Sequence
  SAMD9 targeting guide sequence portion
agcacacuuuucucccucuua

SEQ ID NO: 16423 - RNA, 21 nt, Artificial Sequence
  SAMD9 targeting guide sequence portion
agcauaaucaguaagagggag

SEQ ID NO: 16424 - RNA, 21 nt, Artificial Sequence
  SAMD9 targeting guide sequence portion
agccauuguuaacucaggacu

SEQ ID NO: 16425 - RNA, 21 nt, Artificial Sequence
  SAMD9 targeting guide sequence portion
agcucacucuuuauuguuacu

SEQ ID NO: 16426 - RNA, 21 nt, Artificial Sequence
  SAMD9 targeting guide sequence portion
agcuggauacauggaauucag

SEQ ID NO: 16427 - RNA, 21 nt, Artificial Sequence
  SAMD9 targeting guide sequence portion
agcuuauaaguuauggaguua

SEQ ID NO: 16428 - RNA, 21 nt, Artificial Sequence
  SAMD9 targeting guide sequence portion
agcuugcagccauuguuaacu

SEQ ID NO: 16429 - RNA, 21 nt, Artificial Sequence
  SAMD9 targeting guide sequence portion
aggaagauuuucccuugcuuc

SEQ ID NO: 16430 - RNA, 21 nt, Artificial Sequence
  SAMD9 targeting guide sequence portion
aggacuaaucuuguuucgguu

SEQ ID NO: 16431 - RNA, 21 nt, Artificial Sequence
  SAMD9 targeting guide sequence portion
aggauauuaagguacuauauu

SEQ ID NO: 16432 - RNA, 21 nt, Artificial Sequence
  SAMD9 targeting guide sequence portion
aggcaaucagaaaaauuugaa

SEQ ID NO: 16433 - RNA, 21 nt, Artificial Sequence
  SAMD9 targeting guide sequence portion
aggcaugaacucuuuaaaaaa

SEQ ID NO: 16434 - RNA, 21 nt, Artificial Sequence
  SAMD9 targeting guide sequence portion
agggaaaaucuuccuccagug

SEQ ID NO: 16435 - RNA, 21 nt, Artificial Sequence
  SAMD9 targeting guide sequence portion
agggaaguagaaccgaaacaa

SEQ ID NO: 16436 - RNA, 21 nt, Artificial Sequence
  SAMD9 targeting guide sequence portion
agggagaaaagugugcugaau

SEQ ID NO: 16437 - RNA, 21 nt, Artificial Sequence
  SAMD9 targeting guide sequence portion
agguacuauauuauugaagau

SEQ ID NO: 16438 - RNA, 21 nt, Artificial Sequence
  SAMD9 targeting guide sequence portion
aguaacaauaaagagugagcu

SEQ ID NO: 16439 - RNA, 21 nt, Artificial Sequence
  SAMD9 targeting guide sequence portion
aguaagagggagaaaagugug

SEQ ID NO: 16440 - RNA, 21 nt, Artificial Sequence
  SAMD9 targeting guide sequence portion
aguaauuuuguguuuggggug

SEQ ID NO: 16441 - RNA, 21 nt, Artificial Sequence
  SAMD9 targeting guide sequence portion
aguaccuuaauauccucaaau

SEQ ID NO: 16442 - RNA, 21 nt, Artificial Sequence
  SAMD9 targeting guide sequence portion
aguagaaccgaaacaagauua

SEQ ID NO: 16443 - RNA, 21 nt, Artificial Sequence
  SAMD9 targeting guide sequence portion
aguauguaucucuaaaaggca

SEQ ID NO: 16444 - RNA, 21 nt, Artificial Sequence
  SAMD9 targeting guide sequence portion
aguauuuguaaauaaaugaca

SEQ ID NO: 16445 - RNA, 21 nt, Artificial Sequence
  SAMD9 targeting guide sequence portion
aguccugaguuaacaauggcu

SEQ ID NO: 16446 - RNA, 21 nt, Artificial Sequence
  SAMD9 targeting guide sequence portion
agucuguguucaaauuuuucu

SEQ ID NO: 16447 - RNA, 21 nt, Artificial Sequence
  SAMD9 targeting guide sequence portion
agugaaaaaauucuaaugaga

SEQ ID NO: 16448 - RNA, 21 nt, Artificial Sequence
  SAMD9 targeting guide sequence portion
agugagcuuauaaguuaugga

SEQ ID NO: 16449 - RNA, 21 nt, Artificial Sequence
  SAMD9 targeting guide sequence portion
agugugcugaauuccauguau

SEQ ID NO: 16450 - RNA, 21 nt, Artificial Sequence
  SAMD9 targeting guide sequence portion
aguuaaaauuuuaugcagaag

SEQ ID NO: 16451 - RNA, 21 nt, Artificial Sequence
  SAMD9 targeting guide sequence portion
aguuaacaauggcugcaagcu

SEQ ID NO: 16452 - RNA, 21 nt, Artificial Sequence
  SAMD9 targeting guide sequence portion
aguuauggaguuaaaauuuua

SEQ ID NO: 16453 - RNA, 21 nt, Artificial Sequence
  SAMD9 targeting guide sequence portion
aguucaugccuuuuagagaua

SEQ ID NO: 16454 - RNA, 21 nt, Artificial Sequence
  SAMD9 targeting guide sequence portion
auaaagagugagcuuauaagu

SEQ ID NO: 16455 - RNA, 21 nt, Artificial Sequence
  SAMD9 targeting guide sequence portion
auaaaugacaugaucuagaau

SEQ ID NO: 16456 - RNA, 21 nt, Artificial Sequence
  SAMD9 targeting guide sequence portion
auaaccauggaaucuucaaua

SEQ ID NO: 16457 - RNA, 21 nt, Artificial Sequence
  SAMD9 targeting guide sequence portion
auaacuuauaagcucacucuu

SEQ ID NO: 16458 - RNA, 21 nt, Artificial Sequence
  SAMD9 targeting guide sequence portion
auaagcucacucuuuauuguu

SEQ ID NO: 16459 - RNA, 21 nt, Artificial Sequence
  SAMD9 targeting guide sequence portion
auaaguuauggaguuaaaauu

SEQ ID NO: 16460 - RNA, 21 nt, Artificial Sequence
  SAMD9 targeting guide sequence portion
auaauauaguaccuuaauauc

SEQ ID NO: 16461 - RNA, 21 nt, Artificial Sequence
  SAMD9 targeting guide sequence portion
auaaucaguaagagggagaaa

SEQ ID NO: 16462 - RNA, 21 nt, Artificial Sequence
  SAMD9 targeting guide sequence portion
auacauggaauucagcacacu

SEQ ID NO: 16463 - RNA, 21 nt, Artificial Sequence
  SAMD9 targeting guide sequence portion
auacuuuaguauguaucucua

SEQ ID NO: 16464 - RNA, 21 nt, Artificial Sequence
  SAMD9 targeting guide sequence portion
auaguaccuuaauauccucaa

SEQ ID NO: 16465 - RNA, 21 nt, Artificial Sequence
  SAMD9 targeting guide sequence portion
auauaguaccuuaauauccuc

SEQ ID NO: 16466 - RNA, 21 nt, Artificial Sequence
  SAMD9 targeting guide sequence portion
auauccucaaauaucuagucu

SEQ ID NO: 16467 - RNA, 21 nt, Artificial Sequence
  SAMD9 targeting guide sequence portion
auaucuagucuguguucaaau

SEQ ID NO: 16468 - RNA, 21 nt, Artificial Sequence
  SAMD9 targeting guide sequence portion
auauuauugaagauuccaugg

SEQ ID NO: 16469 - RNA, 21 nt, Artificial Sequence
  SAMD9 targeting guide sequence portion
auauuugaggauauuaaggua

SEQ ID NO: 16470 - RNA, 21 nt, Artificial Sequence
  SAMD9 targeting guide sequence portion
aucaauuauuaggcaaucaga

SEQ ID NO: 16471 - RNA, 21 nt, Artificial Sequence
  SAMD9 targeting guide sequence portion
aucagaaaaauuugaacacag

SEQ ID NO: 16472 - RNA, 21 nt, Artificial Sequence
  SAMD9 targeting guide sequence portion
aucaguaagagggagaaaagu

SEQ ID NO: 16473 - RNA, 21 nt, Artificial Sequence
  SAMD9 targeting guide sequence portion
aucaguaauuuuguguuuggg

SEQ ID NO: 16474 - RNA, 21 nt, Artificial Sequence
  SAMD9 targeting guide sequence portion
auccagcuugcagccauuguu

SEQ ID NO: 16475 - RNA, 21 nt, Artificial Sequence
  SAMD9 targeting guide sequence portion
auccucaaauaucuagucugu

SEQ ID NO: 16476 - RNA, 21 nt, Artificial Sequence
  SAMD9 targeting guide sequence portion
aucuaaaaucaauuauuaggc

SEQ ID NO: 16477 - RNA, 21 nt, Artificial Sequence
  SAMD9 targeting guide sequence portion
aucuagaaucaguaauuuugu

SEQ ID NO: 16478 - RNA, 21 nt, Artificial Sequence
  SAMD9 targeting guide sequence portion
aucuagucuguguucaaauuu

SEQ ID NO: 16479 - RNA, 21 nt, Artificial Sequence
  SAMD9 targeting guide sequence portion
aucucauuagaauuuuuucac

SEQ ID NO: 16480 - RNA, 21 nt, Artificial Sequence
  SAMD9 targeting guide sequence portion
aucucuaaaaggcaugaacuc

SEQ ID NO: 16481 - RNA, 21 nt, Artificial Sequence
  SAMD9 targeting guide sequence portion
aucuuccuccagugaaaaaau

SEQ ID NO: 16482 - RNA, 21 nt, Artificial Sequence
  SAMD9 targeting guide sequence portion
aucuuguuucgguucuacuuc

SEQ ID NO: 16483 - RNA, 21 nt, Artificial Sequence
  SAMD9 targeting guide sequence portion
augaacucuuuaaaaaacaua

SEQ ID NO: 16484 - RNA, 21 nt, Artificial Sequence
  SAMD9 targeting guide sequence portion
augacaugaucuagaaucagu

SEQ ID NO: 16485 - RNA, 21 nt, Artificial Sequence
  SAMD9 targeting guide sequence portion
augagauuuugaagacagaaa

SEQ ID NO: 16486 - RNA, 21 nt, Artificial Sequence
  SAMD9 targeting guide sequence portion
augaucuagaaucaguaauuu

SEQ ID NO: 16487 - RNA, 21 nt, Artificial Sequence
  SAMD9 targeting guide sequence portion
augcagaagcaagggaaaauc

SEQ ID NO: 16488 - RNA, 21 nt, Artificial Sequence
  SAMD9 targeting guide sequence portion
augccuuuuagagauacauac

SEQ ID NO: 16489 - RNA, 21 nt, Artificial Sequence
  SAMD9 targeting guide sequence portion
augcuuuugaaauuuucucuu

SEQ ID NO: 16490 - RNA, 21 nt, Artificial Sequence
  SAMD9 targeting guide sequence portion
auggaaucuucaauaauauag

SEQ ID NO: 16491 - RNA, 21 nt, Artificial Sequence
  SAMD9 targeting guide sequence portion
auggaauucagcacacuuuuc

SEQ ID NO: 16492 - RNA, 21 nt, Artificial Sequence
  SAMD9 targeting guide sequence portion
auggaguuaaaauuuuaugca

SEQ ID NO: 16493 - RNA, 21 nt, Artificial Sequence
  SAMD9 targeting guide sequence portion
auggcugcaagcuggauacau

SEQ ID NO: 16494 - RNA, 21 nt, Artificial Sequence
  SAMD9 targeting guide sequence portion
augguuauguuuuuuaaagag

SEQ ID NO: 16495 - RNA, 21 nt, Artificial Sequence
  SAMD9 targeting guide sequence portion
auguauccagcuugcagccau

SEQ ID NO: 16496 - RNA, 21 nt, Artificial Sequence
  SAMD9 targeting guide sequence portion
auguaucucuaaaaggcauga

SEQ ID NO: 16497 - RNA, 21 nt, Artificial Sequence
  SAMD9 targeting guide sequence portion
augugauuuguuucugucuuc

SEQ ID NO: 16498 - RNA, 21 nt, Artificial Sequence
  SAMD9 targeting guide sequence portion
auguuuuacaagagaaaauuu

SEQ ID NO: 16499 - RNA, 21 nt, Artificial Sequence
  SAMD9 targeting guide sequence portion
auguuuuuuaaagaguucaug

SEQ ID NO: 16500 - RNA, 21 nt, Artificial Sequence
  SAMD9 targeting guide sequence portion
auuaagguacuauauuauuga

SEQ ID NO: 16501 - RNA, 21 nt, Artificial Sequence
  SAMD9 targeting guide sequence portion
auuacugauucuagaucaugu

SEQ ID NO: 16502 - RNA, 21 nt, Artificial Sequence
  SAMD9 targeting guide sequence portion
auuagaaaguaacaauaaaga

SEQ ID NO: 16503 - RNA, 21 nt, Artificial Sequence
  SAMD9 targeting guide sequence portion
auuagaauuuuuucacuggag

SEQ ID NO: 16504 - RNA, 21 nt, Artificial Sequence
  SAMD9 targeting guide sequence portion
auuaggcaaucagaaaaauuu

SEQ ID NO: 16505 - RNA, 21 nt, Artificial Sequence
  SAMD9 targeting guide sequence portion
auuaguccugaguuaacaaug

SEQ ID NO: 16506 - RNA, 21 nt, Artificial Sequence
  SAMD9 targeting guide sequence portion
auuaugcuuuugaaauuuucu

SEQ ID NO: 16507 - RNA, 21 nt, Artificial Sequence
  SAMD9 targeting guide sequence portion
auuauuaggcaaucagaaaaa

SEQ ID NO: 16508 - RNA, 21 nt, Artificial Sequence
  SAMD9 targeting guide sequence portion
auuauugaagauuccaugguu

SEQ ID NO: 16509 - RNA, 21 nt, Artificial Sequence
  SAMD9 targeting guide sequence portion
auucagcacacuuuucucccu

SEQ ID NO: 16510 - RNA, 21 nt, Artificial Sequence
  SAMD9 targeting guide sequence portion
auuccaugguuauguuuuuua

SEQ ID NO: 16511 - RNA, 21 nt, Artificial Sequence
  SAMD9 targeting guide sequence portion
auuccauguauccagcuugca

SEQ ID NO: 16512 - RNA, 21 nt, Artificial Sequence
  SAMD9 targeting guide sequence portion
auucuaaugagauuuugaaga

SEQ ID NO: 16513 - RNA, 21 nt, Artificial Sequence
  SAMD9 targeting guide sequence portion
auucuagaucaugucauuuau

SEQ ID NO: 16514 - RNA, 21 nt, Artificial Sequence
  SAMD9 targeting guide sequence portion
auugaagauuccaugguuaug

SEQ ID NO: 16515 - RNA, 21 nt, Artificial Sequence
  SAMD9 targeting guide sequence portion
auuguuaacucaggacuaauc

SEQ ID NO: 16516 - RNA, 21 nt, Artificial Sequence
  SAMD9 targeting guide sequence portion
auuuacaaauacuuuaguaug

SEQ ID NO: 16517 - RNA, 21 nt, Artificial Sequence
  SAMD9 targeting guide sequence portion
auuucaaaagcauaaucagua

SEQ ID NO: 16518 - RNA, 21 nt, Artificial Sequence
  SAMD9 targeting guide sequence portion
auuugaacacagacuagauau

SEQ ID NO: 16519 - RNA, 21 nt, Artificial Sequence
  SAMD9 targeting guide sequence portion
auuugaggauauuaagguacu

SEQ ID NO: 16520 - RNA, 21 nt, Artificial Sequence
  SAMD9 targeting guide sequence portion
auuuguaaauaaaugacauga

SEQ ID NO: 16521 - RNA, 21 nt, Artificial Sequence
  SAMD9 targeting guide sequence portion
auuuguuucugucuucaaaau

SEQ ID NO: 16522 - RNA, 21 nt, Artificial Sequence
  SAMD9 targeting guide sequence portion
auuuuaacuccauaacuuaua

SEQ ID NO: 16523 - RNA, 21 nt, Artificial Sequence
  SAMD9 targeting guide sequence portion
auuuuaugcagaagcaaggga

SEQ ID NO: 16524 - RNA, 21 nt, Artificial Sequence
  SAMD9 targeting guide sequence portion
auuuucccuugcuucugcaua

SEQ ID NO: 16525 - RNA, 21 nt, Artificial Sequence
  SAMD9 targeting guide sequence portion
auuuugaagacagaaacaaau

SEQ ID NO: 16526 - RNA, 21 nt, Artificial Sequence
  SAMD9 targeting guide sequence portion
auuuuguguuugggguguggg

SEQ ID NO: 16527 - RNA, 21 nt, Artificial Sequence
  SAMD9 targeting guide sequence portion
auuuuucugauugccuaauaa

SEQ ID NO: 16528 - RNA, 21 nt, Artificial Sequence
  SAMD9 targeting guide sequence portion
auuuuuucacuggaggaagau

SEQ ID NO: 16529 - RNA, 21 nt, Artificial Sequence
  SAMD9 targeting guide sequence portion
caaaagcauaaucaguaagag

SEQ ID NO: 16530 - RNA, 21 nt, Artificial Sequence
  SAMD9 targeting guide sequence portion
caaaaucuaaaaucaauuauu

SEQ ID NO: 16531 - RNA, 21 nt, Artificial Sequence
  SAMD9 targeting guide sequence portion
caaaaucucauuagaauuuuu

SEQ ID NO: 16532 - RNA, 21 nt, Artificial Sequence
  SAMD9 targeting guide sequence portion
caaaauuacugauucuagauc

SEQ ID NO: 16533 - RNA, 21 nt, Artificial Sequence
  SAMD9 targeting guide sequence portion
caaacacaaaauuacugauuc

SEQ ID NO: 16534 - RNA, 21 nt, Artificial Sequence
  SAMD9 targeting guide sequence portion
caaauacuuuaguauguaucu

SEQ ID NO: 16535 - RNA, 21 nt, Artificial Sequence
  SAMD9 targeting guide sequence portion
caaauaucuagucuguguuca

SEQ ID NO: 16536 - RNA, 21 nt, Artificial Sequence
  SAMD9 targeting guide sequence portion
caaauuuuucugauugccuaa

SEQ ID NO: 16537 - RNA, 21 nt, Artificial Sequence
  SAMD9 targeting guide sequence portion
caagagaaaauuucaaaagca

SEQ ID NO: 16538 - RNA, 21 nt, Artificial Sequence
  SAMD9 targeting guide sequence portion
caagauuaguccugaguuaac

SEQ ID NO: 16539 - RNA, 21 nt, Artificial Sequence
  SAMD9 targeting guide sequence portion
caagcuggauacauggaauuc

SEQ ID NO: 16540 - RNA, 21 nt, Artificial Sequence
  SAMD9 targeting guide sequence portion
caagggaaaaucuuccuccag

SEQ ID NO: 16541 - RNA, 21 nt, Artificial Sequence
  SAMD9 targeting guide sequence portion
caauaaagagugagcuuauaa

SEQ ID NO: 16542 - RNA, 21 nt, Artificial Sequence
  SAMD9 targeting guide sequence portion
caauaauauaguaccuuaaua

SEQ ID NO: 16543 - RNA, 21 nt, Artificial Sequence
  SAMD9 targeting guide sequence portion
caaucagaaaaauuugaacac

SEQ ID NO: 16544 - RNA, 21 nt, Artificial Sequence
  SAMD9 targeting guide sequence portion
caauggcugcaagcuggauac

SEQ ID NO: 16545 - RNA, 21 nt, Artificial Sequence
  SAMD9 targeting guide sequence portion
caauuagaaaguaacaauaaa

SEQ ID NO: 16546 - RNA, 21 nt, Artificial Sequence
  SAMD9 targeting guide sequence portion
caauuauuaggcaaucagaaa

SEQ ID NO: 16547 - RNA, 21 nt, Artificial Sequence
  SAMD9 targeting guide sequence portion
cacaaaauuacugauucuaga

SEQ ID NO: 16548 - RNA, 21 nt, Artificial Sequence
  SAMD9 targeting guide sequence portion
cacaccccaaacacaaaauua

SEQ ID NO: 16549 - RNA, 21 nt, Artificial Sequence
  SAMD9 targeting guide sequence portion
cacacuuuucucccucuuacu

SEQ ID NO: 16550 - RNA, 21 nt, Artificial Sequence
  SAMD9 targeting guide sequence portion
cacagacuagauauuugagga

SEQ ID NO: 16551 - RNA, 21 nt, Artificial Sequence
  SAMD9 targeting guide sequence portion
caccacccccacaccccaaac

SEQ ID NO: 16552 - RNA, 21 nt, Artificial Sequence
  SAMD9 targeting guide sequence portion
caccccaaacacaaaauuacu

SEQ ID NO: 16553 - RNA, 21 nt, Artificial Sequence
  SAMD9 targeting guide sequence portion
cacccccacaccccaaacaca

SEQ ID NO: 16554 - RNA, 21 nt, Artificial Sequence
  SAMD9 targeting guide sequence portion
cacucuuuauuguuacuuucu

SEQ ID NO: 16555 - RNA, 21 nt, Artificial Sequence
  SAMD9 targeting guide sequence portion
cacuggaggaagauuuucccu

SEQ ID NO: 16556 - RNA, 21 nt, Artificial Sequence
  SAMD9 targeting guide sequence portion
cacuuuucucccucuuacuga

SEQ ID NO: 16557 - RNA, 21 nt, Artificial Sequence
  SAMD9 targeting guide sequence portion
cagaaaaauuugaacacagac

SEQ ID NO: 16558 - RNA, 21 nt, Artificial Sequence
  SAMD9 targeting guide sequence portion
cagaagcaagggaaaaucuuc

SEQ ID NO: 16559 - RNA, 21 nt, Artificial Sequence
  SAMD9 targeting guide sequence portion
cagacuagauauuugaggaua

SEQ ID NO: 16560 - RNA, 21 nt, Artificial Sequence
  SAMD9 targeting guide sequence portion
cagcacacuuuucucccucuu

SEQ ID NO: 16561 - RNA, 21 nt, Artificial Sequence
  SAMD9 targeting guide sequence portion
cagccauuguuaacucaggac

SEQ ID NO: 16562 - RNA, 21 nt, Artificial Sequence
  SAMD9 targeting guide sequence portion
cagcuugcagccauuguuaac

SEQ ID NO: 16563 - RNA, 21 nt, Artificial Sequence
  SAMD9 targeting guide sequence portion
caggacuaaucuuguuucggu

SEQ ID NO: 16564 - RNA, 21 nt, Artificial Sequence
  SAMD9 targeting guide sequence portion
caguaagagggagaaaagugu

SEQ ID NO: 16565 - RNA, 21 nt, Artificial Sequence
  SAMD9 targeting guide sequence portion
caguaauuuuguguuuggggu

SEQ ID NO: 16566 - RNA, 21 nt, Artificial Sequence
  SAMD9 targeting guide sequence portion
cagugaaaaaauucuaaugag

SEQ ID NO: 16567 - RNA, 21 nt, Artificial Sequence
  SAMD9 targeting guide sequence portion
cauaaccauggaaucuucaau

SEQ ID NO: 16568 - RNA, 21 nt, Artificial Sequence
  SAMD9 targeting guide sequence portion
cauaacuuauaagcucacucu

SEQ ID NO: 16569 - RNA, 21 nt, Artificial Sequence
  SAMD9 targeting guide sequence portion
cauaaucaguaagagggagaa

SEQ ID NO: 16570 - RNA, 21 nt, Artificial Sequence
  SAMD9 targeting guide sequence portion
caugaacucuuuaaaaaacau

SEQ ID NO: 16571 - RNA, 21 nt, Artificial Sequence
  SAMD9 targeting guide sequence portion
caugaucuagaaucaguaauu

SEQ ID NO: 16572 - RNA, 21 nt, Artificial Sequence
  SAMD9 targeting guide sequence portion
caugccuuuuagagauacaua

SEQ ID NO: 16573 - RNA, 21 nt, Artificial Sequence
  SAMD9 targeting guide sequence portion
cauggaaucuucaauaauaua

SEQ ID NO: 16574 - RNA, 21 nt, Artificial Sequence
  SAMD9 targeting guide sequence portion
cauggaauucagcacacuuuu

SEQ ID NO: 16575 - RNA, 21 nt, Artificial Sequence
  SAMD9 targeting guide sequence portion
caugguuauguuuuuuaaaga

SEQ ID NO: 16576 - RNA, 21 nt, Artificial Sequence
  SAMD9 targeting guide sequence portion
cauguauccagcuugcagcca

SEQ ID NO: 16577 - RNA, 21 nt, Artificial Sequence
  SAMD9 targeting guide sequence portion
caugucauuuauuuacaaaua

SEQ ID NO: 16578 - RNA, 21 nt, Artificial Sequence
  SAMD9 targeting guide sequence portion
cauuagaauuuuuucacugga

SEQ ID NO: 16579 - RNA, 21 nt, Artificial Sequence
  SAMD9 targeting guide sequence portion
cauuguuaacucaggacuaau

SEQ ID NO: 16580 - RNA, 21 nt, Artificial Sequence
  SAMD9 targeting guide sequence portion
ccaaacacaaaauuacugauu

SEQ ID NO: 16581 - RNA, 21 nt, Artificial Sequence
  SAMD9 targeting guide sequence portion
ccacaccccaaacacaaaauu

SEQ ID NO: 16582 - RNA, 21 nt, Artificial Sequence
  SAMD9 targeting guide sequence portion
ccacccccacaccccaaacac

SEQ ID NO: 16583 - RNA, 21 nt, Artificial Sequence
  SAMD9 targeting guide sequence portion
ccagcuugcagccauuguuaa

SEQ ID NO: 16584 - RNA, 21 nt, Artificial Sequence
  SAMD9 targeting guide sequence portion
ccagugaaaaaauucuaauga

SEQ ID NO: 16585 - RNA, 21 nt, Artificial Sequence
  SAMD9 targeting guide sequence portion
ccauaacuuauaagcucacuc

SEQ ID NO: 16586 - RNA, 21 nt, Artificial Sequence
  SAMD9 targeting guide sequence portion
ccauggaaucuucaauaauau

SEQ ID NO: 16587 - RNA, 21 nt, Artificial Sequence
  SAMD9 targeting guide sequence portion
ccaugguuauguuuuuuaaag

SEQ ID NO: 16588 - RNA, 21 nt, Artificial Sequence
  SAMD9 targeting guide sequence portion
ccauguauccagcuugcagcc

SEQ ID NO: 16589 - RNA, 21 nt, Artificial Sequence
  SAMD9 targeting guide sequence portion
ccauuguuaacucaggacuaa

SEQ ID NO: 16590 - RNA, 21 nt, Artificial Sequence
  SAMD9 targeting guide sequence portion
cccaaacacaaaauuacugau

SEQ ID NO: 16591 - RNA, 21 nt, Artificial Sequence
  SAMD9 targeting guide sequence portion
cccacaccccaaacacaaaau

SEQ ID NO: 16592 - RNA, 21 nt, Artificial Sequence
  SAMD9 targeting guide sequence portion
ccccaaacacaaaauuacuga

SEQ ID NO: 16593 - RNA, 21 nt, Artificial Sequence
  SAMD9 targeting guide sequence portion
ccccacaccccaaacacaaaa

SEQ ID NO: 16594 - RNA, 21 nt, Artificial Sequence
  SAMD9 targeting guide sequence portion
cccccacaccccaaacacaaa

SEQ ID NO: 16595 - RNA, 21 nt, Artificial Sequence
  SAMD9 targeting guide sequence portion
cccucuuacugauuaugcuuu

SEQ ID NO: 16596 - RNA, 21 nt, Artificial Sequence
  SAMD9 targeting guide sequence portion
cccuugcuucugcauaaaauu

SEQ ID NO: 16597 - RNA, 21 nt, Artificial Sequence
  SAMD9 targeting guide sequence portion
cccuuucaccacccccacacc

SEQ ID NO: 16598 - RNA, 21 nt, Artificial Sequence
  SAMD9 targeting guide sequence portion
ccgaaacaagauuaguccuga

SEQ ID NO: 16599 - RNA, 21 nt, Artificial Sequence
  SAMD9 targeting guide sequence portion
ccucaaauaucuagucugugu

SEQ ID NO: 16600 - RNA, 21 nt, Artificial Sequence
  SAMD9 targeting guide sequence portion
ccuccagugaaaaaauucuaa

SEQ ID NO: 16601 - RNA, 21 nt, Artificial Sequence
  SAMD9 targeting guide sequence portion
ccucuuacugauuaugcuuuu

SEQ ID NO: 16602 - RNA, 21 nt, Artificial Sequence
  SAMD9 targeting guide sequence portion
ccugaguuaacaauggcugca

SEQ ID NO: 16603 - RNA, 21 nt, Artificial Sequence
  SAMD9 targeting guide sequence portion
ccuuaauauccucaaauaucu

SEQ ID NO: 16604 - RNA, 21 nt, Artificial Sequence
  SAMD9 targeting guide sequence portion
ccuugcuucugcauaaaauuu

SEQ ID NO: 16605 - RNA, 21 nt, Artificial Sequence
  SAMD9 targeting guide sequence portion
ccuuucaccacccccacaccc

SEQ ID NO: 16606 - RNA, 21 nt, Artificial Sequence
  SAMD9 targeting guide sequence portion
ccuuuuagagauacauacuaa

SEQ ID NO: 16607 - RNA, 21 nt, Artificial Sequence
  SAMD9 targeting guide sequence portion
cgaaacaagauuaguccugag

SEQ ID NO: 16608 - RNA, 21 nt, Artificial Sequence
  SAMD9 targeting guide sequence portion
cgguucuacuucccuuucacc

SEQ ID NO: 16609 - RNA, 21 nt, Artificial Sequence
  SAMD9 targeting guide sequence portion
cuaaaaggcaugaacucuuua

SEQ ID NO: 16610 - RNA, 21 nt, Artificial Sequence
  SAMD9 targeting guide sequence portion
cuaaaaucaauuauuaggcaa

SEQ ID NO: 16611 - RNA, 21 nt, Artificial Sequence
  SAMD9 targeting guide sequence portion
cuaaaguauuuguaaauaaau

SEQ ID NO: 16612 - RNA, 21 nt, Artificial Sequence
  SAMD9 targeting guide sequence portion
cuaaauguuuuacaagagaaa

SEQ ID NO: 16613 - RNA, 21 nt, Artificial Sequence
  SAMD9 targeting guide sequence portion
cuaaucuuguuucgguucuac

SEQ ID NO: 16614 - RNA, 21 nt, Artificial Sequence
  SAMD9 targeting guide sequence portion
cuaaugagauuuugaagacag

SEQ ID NO: 16615 - RNA, 21 nt, Artificial Sequence
  SAMD9 targeting guide sequence portion
cuacuucccuuucaccacccc

SEQ ID NO: 16616 - RNA, 21 nt, Artificial Sequence
  SAMD9 targeting guide sequence portion
cuagaaucaguaauuuugugu

SEQ ID NO: 16617 - RNA, 21 nt, Artificial Sequence
  SAMD9 targeting guide sequence portion
cuagauauuugaggauauuaa

SEQ ID NO: 16618 - RNA, 21 nt, Artificial Sequence
  SAMD9 targeting guide sequence portion
cuagaucaugucauuuauuua

SEQ ID NO: 16619 - RNA, 21 nt, Artificial Sequence
  SAMD9 targeting guide sequence portion
cuagucuguguucaaauuuuu

SEQ ID NO: 16620 - RNA, 21 nt, Artificial Sequence
  SAMD9 targeting guide sequence portion
cuauauuauugaagauuccau

SEQ ID NO: 16621 - RNA, 21 nt, Artificial Sequence
  SAMD9 targeting guide sequence portion
cucaaauaucuagucuguguu

SEQ ID NO: 16622 - RNA, 21 nt, Artificial Sequence
  SAMD9 targeting guide sequence portion
cucacucuuuauuguuacuuu

SEQ ID NO: 16623 - RNA, 21 nt, Artificial Sequence
  SAMD9 targeting guide sequence portion
cucaggacuaaucuuguuucg

SEQ ID NO: 16624 - RNA, 21 nt, Artificial Sequence
  SAMD9 targeting guide sequence portion
cucauuagaauuuuuucacug

SEQ ID NO: 16625 - RNA, 21 nt, Artificial Sequence
  SAMD9 targeting guide sequence portion
cuccagugaaaaaauucuaau

SEQ ID NO: 16626 - RNA, 21 nt, Artificial Sequence
  SAMD9 targeting guide sequence portion
cuccauaacuuauaagcucac

SEQ ID NO: 16627 - RNA, 21 nt, Artificial Sequence
  SAMD9 targeting guide sequence portion
cucccucuuacugauuaugcu

SEQ ID NO: 16628 - RNA, 21 nt, Artificial Sequence
  SAMD9 targeting guide sequence portion
cucuaaaaggcaugaacucuu

SEQ ID NO: 16629 - RNA, 21 nt, Artificial Sequence
  SAMD9 targeting guide sequence portion
cucuuacugauuaugcuuuug

SEQ ID NO: 16630 - RNA, 21 nt, Artificial Sequence
  SAMD9 targeting guide sequence portion
cucuuguaaaacauuuagaaa

SEQ ID NO: 16631 - RNA, 21 nt, Artificial Sequence
  SAMD9 targeting guide sequence portion
cucuuuaaaaaacauaaccau

SEQ ID NO: 16632 - RNA, 21 nt, Artificial Sequence
  SAMD9 targeting guide sequence portion
cucuuuauuguuacuuucuaa

SEQ ID NO: 16633 - RNA, 21 nt, Artificial Sequence
  SAMD9 targeting guide sequence portion
cugaauuccauguauccagcu

SEQ ID NO: 16634 - RNA, 21 nt, Artificial Sequence
  SAMD9 targeting guide sequence portion
cugaguuaacaauggcugcaa

SEQ ID NO: 16635 - RNA, 21 nt, Artificial Sequence
  SAMD9 targeting guide sequence portion
cugauuaugcuuuugaaauuu

SEQ ID NO: 16636 - RNA, 21 nt, Artificial Sequence
  SAMD9 targeting guide sequence portion
cugauucuagaucaugucauu

SEQ ID NO: 16637 - RNA, 21 nt, Artificial Sequence
  SAMD9 targeting guide sequence portion
cugauugccuaauaauugauu

SEQ ID NO: 16638 - RNA, 21 nt, Artificial Sequence
  SAMD9 targeting guide sequence portion
cugcaagcuggauacauggaa

SEQ ID NO: 16639 - RNA, 21 nt, Artificial Sequence
  SAMD9 targeting guide sequence portion
cugcauaaaauuuuaacucca

SEQ ID NO: 16640 - RNA, 21 nt, Artificial Sequence
  SAMD9 targeting guide sequence portion
cuggaggaagauuuucccuug

SEQ ID NO: 16641 - RNA, 21 nt, Artificial Sequence
  SAMD9 targeting guide sequence portion
cuggauacauggaauucagca

SEQ ID NO: 16642 - RNA, 21 nt, Artificial Sequence
  SAMD9 targeting guide sequence portion
cugucuucaaaaucucauuag

SEQ ID NO: 16643 - RNA, 21 nt, Artificial Sequence
  SAMD9 targeting guide sequence portion
cuguguucaaauuuuucugau

SEQ ID NO: 16644 - RNA, 21 nt, Artificial Sequence
  SAMD9 targeting guide sequence portion
cuuaauauccucaaauaucua

SEQ ID NO: 16645 - RNA, 21 nt, Artificial Sequence
  SAMD9 targeting guide sequence portion
cuuacugauuaugcuuuugaa

SEQ ID NO: 16646 - RNA, 21 nt, Artificial Sequence
  SAMD9 targeting guide sequence portion
cuuauaagcucacucuuuauu

SEQ ID NO: 16647 - RNA, 21 nt, Artificial Sequence
  SAMD9 targeting guide sequence portion
cuucaaaaucucauuagaauu

SEQ ID NO: 16648 - RNA, 21 nt, Artificial Sequence
  SAMD9 targeting guide sequence portion
cuucaauaauauaguaccuua

SEQ ID NO: 16649 - RNA, 21 nt, Artificial Sequence
  SAMD9 targeting guide sequence portion
cuucccuuucaccacccccac

SEQ ID NO: 16650 - RNA, 21 nt, Artificial Sequence
  SAMD9 targeting guide sequence portion
cuuccuccagugaaaaaauuc

SEQ ID NO: 16651 - RNA, 21 nt, Artificial Sequence
  SAMD9 targeting guide sequence portion
cuucugcauaaaauuuuaacu

SEQ ID NO: 16652 - RNA, 21 nt, Artificial Sequence
  SAMD9 targeting guide sequence portion
cuugcagccauuguuaacuca

SEQ ID NO: 16653 - RNA, 21 nt, Artificial Sequence
  SAMD9 targeting guide sequence portion
cuugcuucugcauaaaauuuu

SEQ ID NO: 16654 - RNA, 21 nt, Artificial Sequence
  SAMD9 targeting guide sequence portion
cuuguaaaacauuuagaaaac

SEQ ID NO: 16655 - RNA, 21 nt, Artificial Sequence
  SAMD9 targeting guide sequence portion
cuuguuucgguucuacuuccc

SEQ ID NO: 16656 - RNA, 21 nt, Artificial Sequence
  SAMD9 targeting guide sequence portion
cuuuaaaaaacauaaccaugg

SEQ ID NO: 16657 - RNA, 21 nt, Artificial Sequence
  SAMD9 targeting guide sequence portion
cuuuaguauguaucucuaaaa

SEQ ID NO: 16658 - RNA, 21 nt, Artificial Sequence
  SAMD9 targeting guide sequence portion
cuuuauuguuacuuucuaauu

SEQ ID NO: 16659 - RNA, 21 nt, Artificial Sequence
  SAMD9 targeting guide sequence portion
cuuucaccacccccacacccc

SEQ ID NO: 16660 - RNA, 21 nt, Artificial Sequence
  SAMD9 targeting guide sequence portion
cuuuuagagauacauacuaaa

SEQ ID NO: 16661 - RNA, 21 nt, Artificial Sequence
  SAMD9 targeting guide sequence portion
cuuuucucccucuuacugauu

SEQ ID NO: 16662 - RNA, 21 nt, Artificial Sequence
  SAMD9 targeting guide sequence portion
cuuuugaaauuuucucuugua

SEQ ID NO: 16663 - RNA, 21 nt, Artificial Sequence
  SAMD9 targeting guide sequence portion
gaaaaaauucuaaugagauuu

SEQ ID NO: 16664 - RNA, 21 nt, Artificial Sequence
  SAMD9 targeting guide sequence portion
gaaaaauuugaacacagacua

SEQ ID NO: 16665 - RNA, 21 nt, Artificial Sequence
  SAMD9 targeting guide sequence portion
gaaaagugugcugaauuccau

SEQ ID NO: 16666 - RNA, 21 nt, Artificial Sequence
  SAMD9 targeting guide sequence portion
gaaaaucuuccuccagugaaa

SEQ ID NO: 16667 - RNA, 21 nt, Artificial Sequence
  SAMD9 targeting guide sequence portion
gaaaauuucaaaagcauaauc

SEQ ID NO: 16668 - RNA, 21 nt, Artificial Sequence
  SAMD9 targeting guide sequence portion
gaaacaagauuaguccugagu

SEQ ID NO: 16669 - RNA, 21 nt, Artificial Sequence
  SAMD9 targeting guide sequence portion
gaaagggaaguagaaccgaaa

SEQ ID NO: 16670 - RNA, 21 nt, Artificial Sequence
  SAMD9 targeting guide sequence portion
gaaaguaacaauaaagaguga

SEQ ID NO: 16671 - RNA, 21 nt, Artificial Sequence
  SAMD9 targeting guide sequence portion
gaaauuuucucuuguaaaaca

SEQ ID NO: 16672 - RNA, 21 nt, Artificial Sequence
  SAMD9 targeting guide sequence portion
gaacacagacuagauauuuga

SEQ ID NO: 16673 - RNA, 21 nt, Artificial Sequence
  SAMD9 targeting guide sequence portion
gaaccgaaacaagauuagucc

SEQ ID NO: 16674 - RNA, 21 nt, Artificial Sequence
  SAMD9 targeting guide sequence portion
gaacucuuuaaaaaacauaac

SEQ ID NO: 16675 - RNA, 21 nt, Artificial Sequence
  SAMD9 targeting guide sequence portion
gaagauuccaugguuauguuu

SEQ ID NO: 16676 - RNA, 21 nt, Artificial Sequence
  SAMD9 targeting guide sequence portion
gaagauuuucccuugcuucug

SEQ ID NO: 16677 - RNA, 21 nt, Artificial Sequence
  SAMD9 targeting guide sequence portion
gaagcaagggaaaaucuuccu

SEQ ID NO: 16678 - RNA, 21 nt, Artificial Sequence
  SAMD9 targeting guide sequence portion
gaaguagaaccgaaacaagau

SEQ ID NO: 16679 - RNA, 21 nt, Artificial Sequence
  SAMD9 targeting guide sequence portion
gaaucaguaauuuuguguuug

SEQ ID NO: 16680 - RNA, 21 nt, Artificial Sequence
  SAMD9 targeting guide sequence portion
gaaucuucaauaauauaguac

SEQ ID NO: 16681 - RNA, 21 nt, Artificial Sequence
  SAMD9 targeting guide sequence portion
gaauucagcacacuuuucucc

SEQ ID NO: 16682 - RNA, 21 nt, Artificial Sequence
  SAMD9 targeting guide sequence portion
gaauuccauguauccagcuug

SEQ ID NO: 16683 - RNA, 21 nt, Artificial Sequence
  SAMD9 targeting guide sequence portion
gaauuuuuucacuggaggaag

SEQ ID NO: 16684 - RNA, 21 nt, Artificial Sequence
  SAMD9 targeting guide sequence portion
gacaugaucuagaaucaguaa

SEQ ID NO: 16685 - RNA, 21 nt, Artificial Sequence
  SAMD9 targeting guide sequence portion
gacuaaucuuguuucgguucu

SEQ ID NO: 16686 - RNA, 21 nt, Artificial Sequence
  SAMD9 targeting guide sequence portion
gacuagauauuugaggauauu

SEQ ID NO: 16687 - RNA, 21 nt, Artificial Sequence
  SAMD9 targeting guide sequence portion
gagaaaagugugcugaauucc

SEQ ID NO: 16688 - RNA, 21 nt, Artificial Sequence
  SAMD9 targeting guide sequence portion
gagaaaauuucaaaagcauaa

SEQ ID NO: 16689 - RNA, 21 nt, Artificial Sequence
  SAMD9 targeting guide sequence portion
gagauacauacuaaaguauuu

SEQ ID NO: 16690 - RNA, 21 nt, Artificial Sequence
  SAMD9 targeting guide sequence portion
gagauuuugaagacagaaaca

SEQ ID NO: 16691 - RNA, 21 nt, Artificial Sequence
  SAMD9 targeting guide sequence portion
gagcuuauaaguuauggaguu

SEQ ID NO: 16692 - RNA, 21 nt, Artificial Sequence
  SAMD9 targeting guide sequence portion
gaggaagauuuucccuugcuu

SEQ ID NO: 16693 - RNA, 21 nt, Artificial Sequence
  SAMD9 targeting guide sequence portion
gaggauauuaagguacuauau

SEQ ID NO: 16694 - RNA, 21 nt, Artificial Sequence
  SAMD9 targeting guide sequence portion
gagggagaaaagugugcugaa

SEQ ID NO: 16695 - RNA, 21 nt, Artificial Sequence
  SAMD9 targeting guide sequence portion
gagugagcuuauaaguuaugg

SEQ ID NO: 16696 - RNA, 21 nt, Artificial Sequence
  SAMD9 targeting guide sequence portion
gaguuaaaauuuuaugcagaa

SEQ ID NO: 16697 - RNA, 21 nt, Artificial Sequence
  SAMD9 targeting guide sequence portion
gaguuaacaauggcugcaagc

SEQ ID NO: 16698 - RNA, 21 nt, Artificial Sequence
  SAMD9 targeting guide sequence portion
gaguucaugccuuuuagagau

SEQ ID NO: 16699 - RNA, 21 nt, Artificial Sequence
  SAMD9 targeting guide sequence portion
gauacauggaauucagcacac

SEQ ID NO: 16700 - RNA, 21 nt, Artificial Sequence
  SAMD9 targeting guide sequence portion
gauauuaagguacuauauuau

SEQ ID NO: 16701 - RNA, 21 nt, Artificial Sequence
  SAMD9 targeting guide sequence portion
gauauuugaggauauuaaggu

SEQ ID NO: 16702 - RNA, 21 nt, Artificial Sequence
  SAMD9 targeting guide sequence portion
gaucaugucauuuauuuacaa

SEQ ID NO: 16703 - RNA, 21 nt, Artificial Sequence
  SAMD9 targeting guide sequence portion
gaucuagaaucaguaauuuug

SEQ ID NO: 16704 - RNA, 21 nt, Artificial Sequence
  SAMD9 targeting guide sequence portion
gauuaguccugaguuaacaau

SEQ ID NO: 16705 - RNA, 21 nt, Artificial Sequence
  SAMD9 targeting guide sequence portion
gauuaugcuuuugaaauuuuc

SEQ ID NO: 16706 - RNA, 21 nt, Artificial Sequence
  SAMD9 targeting guide sequence portion
gauuccaugguuauguuuuuu

SEQ ID NO: 16707 - RNA, 21 nt, Artificial Sequence
  SAMD9 targeting guide sequence portion
gauucuagaucaugucauuua

SEQ ID NO: 16708 - RNA, 21 nt, Artificial Sequence
  SAMD9 targeting guide sequence portion
gauugccuaauaauugauuuu

SEQ ID NO: 16709 - RNA, 21 nt, Artificial Sequence
  SAMD9 targeting guide sequence portion
gauuuguuucugucuucaaaa

SEQ ID NO: 16710 - RNA, 21 nt, Artificial Sequence
  SAMD9 targeting guide sequence portion
gauuuucccuugcuucugcau

SEQ ID NO: 16711 - RNA, 21 nt, Artificial Sequence
  SAMD9 targeting guide sequence portion
gauuuugaagacagaaacaaa

SEQ ID NO: 16712 - RNA, 21 nt, Artificial Sequence
  SAMD9 targeting guide sequence portion
gcaagcuggauacauggaauu

SEQ ID NO: 16713 - RNA, 21 nt, Artificial Sequence
  SAMD9 targeting guide sequence portion
gcaagggaaaaucuuccucca

SEQ ID NO: 16714 - RNA, 21 nt, Artificial Sequence
  SAMD9 targeting guide sequence portion
gcaaucagaaaaauuugaaca

SEQ ID NO: 16715 - RNA, 21 nt, Artificial Sequence
  SAMD9 targeting guide sequence portion
gcacacuuuucucccucuuac

SEQ ID NO: 16716 - RNA, 21 nt, Artificial Sequence
  SAMD9 targeting guide sequence portion
gcagaagcaagggaaaaucuu

SEQ ID NO: 16717 - RNA, 21 nt, Artificial Sequence
  SAMD9 targeting guide sequence portion
gcagccauuguuaacucagga

SEQ ID NO: 16718 - RNA, 21 nt, Artificial Sequence
  SAMD9 targeting guide sequence portion
gcauaaaauuuuaacuccaua

SEQ ID NO: 16719 - RNA, 21 nt, Artificial Sequence
  SAMD9 targeting guide sequence portion
gcauaaucaguaagagggaga

SEQ ID NO: 16720 - RNA, 21 nt, Artificial Sequence
  SAMD9 targeting guide sequence portion
gcaugaacucuuuaaaaaaca

SEQ ID NO: 16721 - RNA, 21 nt, Artificial Sequence
  SAMD9 targeting guide sequence portion
gccauuguuaacucaggacua

SEQ ID NO: 16722 - RNA, 21 nt, Artificial Sequence
  SAMD9 targeting guide sequence portion
gccuuuuagagauacauacua

SEQ ID NO: 16723 - RNA, 21 nt, Artificial Sequence
  SAMD9 targeting guide sequence portion
gcucacucuuuauuguuacuu

SEQ ID NO: 16724 - RNA, 21 nt, Artificial Sequence
  SAMD9 targeting guide sequence portion
gcugaauuccauguauccagc

SEQ ID NO: 16725 - RNA, 21 nt, Artificial Sequence
  SAMD9 targeting guide sequence portion
gcugcaagcuggauacaugga

SEQ ID NO: 16726 - RNA, 21 nt, Artificial Sequence
  SAMD9 targeting guide sequence portion
gcuggauacauggaauucagc

SEQ ID NO: 16727 - RNA, 21 nt, Artificial Sequence
  SAMD9 targeting guide sequence portion
gcuuauaaguuauggaguuaa

SEQ ID NO: 16728 - RNA, 21 nt, Artificial Sequence
  SAMD9 targeting guide sequence portion
gcuucugcauaaaauuuuaac

SEQ ID NO: 16729 - RNA, 21 nt, Artificial Sequence
  SAMD9 targeting guide sequence portion
gcuugcagccauuguuaacuc

SEQ ID NO: 16730 - RNA, 21 nt, Artificial Sequence
  SAMD9 targeting guide sequence portion
gcuuuugaaauuuucucuugu

SEQ ID NO: 16731 - RNA, 21 nt, Artificial Sequence
  SAMD9 targeting guide sequence portion
ggaaaaucuuccuccagugaa

SEQ ID NO: 16732 - RNA, 21 nt, Artificial Sequence
  SAMD9 targeting guide sequence portion
ggaagauuuucccuugcuucu

SEQ ID NO: 16733 - RNA, 21 nt, Artificial Sequence
  SAMD9 targeting guide sequence portion
ggaaguagaaccgaaacaaga

SEQ ID NO: 16734 - RNA, 21 nt, Artificial Sequence
  SAMD9 targeting guide sequence portion
ggaaucuucaauaauauagua

SEQ ID NO: 16735 - RNA, 21 nt, Artificial Sequence
  SAMD9 targeting guide sequence portion
ggaauucagcacacuuuucuc

SEQ ID NO: 16736 - RNA, 21 nt, Artificial Sequence
  SAMD9 targeting guide sequence portion
ggacuaaucuuguuucgguuc

SEQ ID NO: 16737 - RNA, 21 nt, Artificial Sequence
  SAMD9 targeting guide sequence portion
ggagaaaagugugcugaauuc

SEQ ID NO: 16738 - RNA, 21 nt, Artificial Sequence
  SAMD9 targeting guide sequence portion
ggaggaagauuuucccuugcu

SEQ ID NO: 16739 - RNA, 21 nt, Artificial Sequence
  SAMD9 targeting guide sequence portion
ggaguuaaaauuuuaugcaga

SEQ ID NO: 16740 - RNA, 21 nt, Artificial Sequence
  SAMD9 targeting guide sequence portion
ggauacauggaauucagcaca

SEQ ID NO: 16741 - RNA, 21 nt, Artificial Sequence
  SAMD9 targeting guide sequence portion
ggauauuaagguacuauauua

SEQ ID NO: 16742 - RNA, 21 nt, Artificial Sequence
  SAMD9 targeting guide sequence portion
ggcaaucagaaaaauuugaac

SEQ ID NO: 16743 - RNA, 21 nt, Artificial Sequence
  SAMD9 targeting guide sequence portion
ggcaugaacucuuuaaaaaac

SEQ ID NO: 16744 - RNA, 21 nt, Artificial Sequence
  SAMD9 targeting guide sequence portion
ggcugcaagcuggauacaugg

SEQ ID NO: 16745 - RNA, 21 nt, Artificial Sequence
  SAMD9 targeting guide sequence portion
gggaaaaucuuccuccaguga

SEQ ID NO: 16746 - RNA, 21 nt, Artificial Sequence
  SAMD9 targeting guide sequence portion
gggaaguagaaccgaaacaag

SEQ ID NO: 16747 - RNA, 21 nt, Artificial Sequence
  SAMD9 targeting guide sequence portion
gggagaaaagugugcugaauu

SEQ ID NO: 16748 - RNA, 21 nt, Artificial Sequence
  SAMD9 targeting guide sequence portion
ggggguggugaaagggaagua

SEQ ID NO: 16749 - RNA, 21 nt, Artificial Sequence
  SAMD9 targeting guide sequence portion
gggguggugaaagggaaguag

SEQ ID NO: 16750 - RNA, 21 nt, Artificial Sequence
  SAMD9 targeting guide sequence portion
gggguguggggguggugaaag

SEQ ID NO: 16751 - RNA, 21 nt, Artificial Sequence
  SAMD9 targeting guide sequence portion
ggguggugaaagggaaguaga

SEQ ID NO: 16752 - RNA, 21 nt, Artificial Sequence
  SAMD9 targeting guide sequence portion
ggguguggggguggugaaagg

SEQ ID NO: 16753 - RNA, 21 nt, Artificial Sequence
  SAMD9 targeting guide sequence portion
gguacuauauuauugaagauu

SEQ ID NO: 16754 - RNA, 21 nt, Artificial Sequence
  SAMD9 targeting guide sequence portion
ggugaaagggaaguagaaccg

SEQ ID NO: 16755 - RNA, 21 nt, Artificial Sequence
  SAMD9 targeting guide sequence portion
gguggugaaagggaaguagaa

SEQ ID NO: 16756 - RNA, 21 nt, Artificial Sequence
  SAMD9 targeting guide sequence portion
gguguggggguggugaaaggg

SEQ ID NO: 16757 - RNA, 21 nt, Artificial Sequence
  SAMD9 targeting guide sequence portion
gguuauguuuuuuaaagaguu

SEQ ID NO: 16758 - RNA, 21 nt, Artificial Sequence
  SAMD9 targeting guide sequence portion
gguucuacuucccuuucacca

SEQ ID NO: 16759 - RNA, 21 nt, Artificial Sequence
  SAMD9 targeting guide sequence portion
guaaauaaaugacaugaucua

SEQ ID NO: 16760 - RNA, 21 nt, Artificial Sequence
  SAMD9 targeting guide sequence portion
guaacaauaaagagugagcuu

SEQ ID NO: 16761 - RNA, 21 nt, Artificial Sequence
  SAMD9 targeting guide sequence portion
guaagagggagaaaagugugc

SEQ ID NO: 16762 - RNA, 21 nt, Artificial Sequence
  SAMD9 targeting guide sequence portion
guaauuuuguguuuggggugu

SEQ ID NO: 16763 - RNA, 21 nt, Artificial Sequence
  SAMD9 targeting guide sequence portion
guaccuuaauauccucaaaua

SEQ ID NO: 16764 - RNA, 21 nt, Artificial Sequence
  SAMD9 targeting guide sequence portion
guacuauauuauugaagauuc

SEQ ID NO: 16765 - RNA, 21 nt, Artificial Sequence
  SAMD9 targeting guide sequence portion
guagaaccgaaacaagauuag

SEQ ID NO: 16766 - RNA, 21 nt, Artificial Sequence
  SAMD9 targeting guide sequence portion
guauccagcuugcagccauug

SEQ ID NO: 16767 - RNA, 21 nt, Artificial Sequence
  SAMD9 targeting guide sequence portion
guaucucuaaaaggcaugaac

SEQ ID NO: 16768 - RNA, 21 nt, Artificial Sequence
  SAMD9 targeting guide sequence portion
guauguaucucuaaaaggcau

SEQ ID NO: 16769 - RNA, 21 nt, Artificial Sequence
  SAMD9 targeting guide sequence portion
guauuuguaaauaaaugacau

SEQ ID NO: 16770 - RNA, 21 nt, Artificial Sequence
  SAMD9 targeting guide sequence portion
gucaauuagaaaguaacaaua

SEQ ID NO: 16771 - RNA, 21 nt, Artificial Sequence
  SAMD9 targeting guide sequence portion
guccugaguuaacaauggcug

SEQ ID NO: 16772 - RNA, 21 nt, Artificial Sequence
  SAMD9 targeting guide sequence portion
gucuguguucaaauuuuucug

SEQ ID NO: 16773 - RNA, 21 nt, Artificial Sequence
  SAMD9 targeting guide sequence portion
gucuucaaaaucucauuagaa

SEQ ID NO: 16774 - RNA, 21 nt, Artificial Sequence
  SAMD9 targeting guide sequence portion
gugaaaaaauucuaaugagau

SEQ ID NO: 16775 - RNA, 21 nt, Artificial Sequence
  SAMD9 targeting guide sequence portion
gugaaagggaaguagaaccga

SEQ ID NO: 16776 - RNA, 21 nt, Artificial Sequence
  SAMD9 targeting guide sequence portion
gugagcuuauaaguuauggag

SEQ ID NO: 16777 - RNA, 21 nt, Artificial Sequence
  SAMD9 targeting guide sequence portion
gugauuuguuucugucuucaa

SEQ ID NO: 16778 - RNA, 21 nt, Artificial Sequence
  SAMD9 targeting guide sequence portion
gugcugaauuccauguaucca

SEQ ID NO: 16779 - RNA, 21 nt, Artificial Sequence
  SAMD9 targeting guide sequence portion
guggggguggugaaagggaag

SEQ ID NO: 16780 - RNA, 21 nt, Artificial Sequence
  SAMD9 targeting guide sequence portion
guggugaaagggaaguagaac

SEQ ID NO: 16781 - RNA, 21 nt, Artificial Sequence
  SAMD9 targeting guide sequence portion
gugugcugaauuccauguauc

SEQ ID NO: 16782 - RNA, 21 nt, Artificial Sequence
  SAMD9 targeting guide sequence portion
guguggggguggugaaaggga

SEQ ID NO: 16783 - RNA, 21 nt, Artificial Sequence
  SAMD9 targeting guide sequence portion
guguucaaauuuuucugauug

SEQ ID NO: 16784 - RNA, 21 nt, Artificial Sequence
  SAMD9 targeting guide sequence portion
guguuuggggugugggggugg

SEQ ID NO: 16785 - RNA, 21 nt, Artificial Sequence
  SAMD9 targeting guide sequence portion
guuaaaauuuuaugcagaagc

SEQ ID NO: 16786 - RNA, 21 nt, Artificial Sequence
  SAMD9 targeting guide sequence portion
guuaacaauggcugcaagcug

SEQ ID NO: 16787 - RNA, 21 nt, Artificial Sequence
  SAMD9 targeting guide sequence portion
guuaacucaggacuaaucuug

SEQ ID NO: 16788 - RNA, 21 nt, Artificial Sequence
  SAMD9 targeting guide sequence portion
guuauggaguuaaaauuuuau

SEQ ID NO: 16789 - RNA, 21 nt, Artificial Sequence
  SAMD9 targeting guide sequence portion
guuauguuuuuuaaagaguuc

SEQ ID NO: 16790 - RNA, 21 nt, Artificial Sequence
  SAMD9 targeting guide sequence portion
guucaaauuuuucugauugcc

SEQ ID NO: 16791 - RNA, 21 nt, Artificial Sequence
  SAMD9 targeting guide sequence portion
guucaugccuuuuagagauac

SEQ ID NO: 16792 - RNA, 21 nt, Artificial Sequence
  SAMD9 targeting guide sequence portion
guucuacuucccuuucaccac

SEQ ID NO: 16793 - RNA, 21 nt, Artificial Sequence
  SAMD9 targeting guide sequence portion
guuucgguucuacuucccuuu

SEQ ID NO: 16794 - RNA, 21 nt, Artificial Sequence
  SAMD9 targeting guide sequence portion
guuucugucuucaaaaucuca

SEQ ID NO: 16795 - RNA, 21 nt, Artificial Sequence
  SAMD9 targeting guide sequence portion
guuugggguguggggguggug

SEQ ID NO: 16796 - RNA, 21 nt, Artificial Sequence
  SAMD9 targeting guide sequence portion
guuuuacaagagaaaauuuca

SEQ ID NO: 16797 - RNA, 21 nt, Artificial Sequence
  SAMD9 targeting guide sequence portion
guuuucuaaauguuuuacaag

SEQ ID NO: 16798 - RNA, 21 nt, Artificial Sequence
  SAMD9 targeting guide sequence portion
guuuuuguuuucuaaauguuu

SEQ ID NO: 16799 - RNA, 21 nt, Artificial Sequence
  SAMD9 targeting guide sequence portion
guuuuuuaaagaguucaugcc

SEQ ID NO: 16800 - RNA, 21 nt, Artificial Sequence
  SAMD9 targeting guide sequence portion
uaaaaaacauaaccauggaau

SEQ ID NO: 16801 - RNA, 21 nt, Artificial Sequence
  SAMD9 targeting guide sequence portion
uaaaaggcaugaacucuuuaa

SEQ ID NO: 16802 - RNA, 21 nt, Artificial Sequence
  SAMD9 targeting guide sequence portion
uaaaaucaauuauuaggcaau

SEQ ID NO: 16803 - RNA, 21 nt, Artificial Sequence
  SAMD9 targeting guide sequence portion
uaaaauuuuaugcagaagcaa

SEQ ID NO: 16804 - RNA, 21 nt, Artificial Sequence
  SAMD9 targeting guide sequence portion
uaaagagugagcuuauaaguu

SEQ ID NO: 16805 - RNA, 21 nt, Artificial Sequence
  SAMD9 targeting guide sequence portion
uaaagaguucaugccuuuuag

SEQ ID NO: 16806 - RNA, 21 nt, Artificial Sequence
  SAMD9 targeting guide sequence portion
uaaauaaaugacaugaucuag

SEQ ID NO: 16807 - RNA, 21 nt, Artificial Sequence
  SAMD9 targeting guide sequence portion
uaaaugacaugaucuagaauc

SEQ ID NO: 16808 - RNA, 21 nt, Artificial Sequence
  SAMD9 targeting guide sequence portion
uaacaauaaagagugagcuua

SEQ ID NO: 16809 - RNA, 21 nt, Artificial Sequence
  SAMD9 targeting guide sequence portion
uaacaauggcugcaagcugga

SEQ ID NO: 16810 - RNA, 21 nt, Artificial Sequence
  SAMD9 targeting guide sequence portion
uaaccauggaaucuucaauaa

SEQ ID NO: 16811 - RNA, 21 nt, Artificial Sequence
  SAMD9 targeting guide sequence portion
uaacucaggacuaaucuuguu

SEQ ID NO: 16812 - RNA, 21 nt, Artificial Sequence
  SAMD9 targeting guide sequence portion
uaacuccauaacuuauaagcu

SEQ ID NO: 16813 - RNA, 21 nt, Artificial Sequence
  SAMD9 targeting guide sequence portion
uaacuuauaagcucacucuuu

SEQ ID NO: 16814 - RNA, 21 nt, Artificial Sequence
  SAMD9 targeting guide sequence portion
uaagagggagaaaagugugcu

SEQ ID NO: 16815 - RNA, 21 nt, Artificial Sequence
  SAMD9 targeting guide sequence portion
uaagcucacucuuuauuguua

SEQ ID NO: 16816 - RNA, 21 nt, Artificial Sequence
  SAMD9 targeting guide sequence portion
uaagguacuauauuauugaag

SEQ ID NO: 16817 - RNA, 21 nt, Artificial Sequence
  SAMD9 targeting guide sequence portion
uaaguuauggaguuaaaauuu

SEQ ID NO: 16818 - RNA, 21 nt, Artificial Sequence
  SAMD9 targeting guide sequence portion
uaauauaguaccuuaauaucc

SEQ ID NO: 16819 - RNA, 21 nt, Artificial Sequence
  SAMD9 targeting guide sequence portion
uaauauccucaaauaucuagu

SEQ ID NO: 16820 - RNA, 21 nt, Artificial Sequence
  SAMD9 targeting guide sequence portion
uaaucaguaagagggagaaaa

SEQ ID NO: 16821 - RNA, 21 nt, Artificial Sequence
  SAMD9 targeting guide sequence portion
uaaucuuguuucgguucuacu

SEQ ID NO: 16822 - RNA, 21 nt, Artificial Sequence
  SAMD9 targeting guide sequence portion
uaaugagauuuugaagacaga

SEQ ID NO: 16823 - RNA, 21 nt, Artificial Sequence
  SAMD9 targeting guide sequence portion
uaauuuuguguuuggggugug

SEQ ID NO: 16824 - RNA, 21 nt, Artificial Sequence
  SAMD9 targeting guide sequence portion
uacaaauacuuuaguauguau

SEQ ID NO: 16825 - RNA, 21 nt, Artificial Sequence
  SAMD9 targeting guide sequence portion
uacaagagaaaauuucaaaag

SEQ ID NO: 16826 - RNA, 21 nt, Artificial Sequence
  SAMD9 targeting guide sequence portion
uacauggaauucagcacacuu

SEQ ID NO: 16827 - RNA, 21 nt, Artificial Sequence
  SAMD9 targeting guide sequence portion
uaccuuaauauccucaaauau

SEQ ID NO: 16828 - RNA, 21 nt, Artificial Sequence
  SAMD9 targeting guide sequence portion
uacuauauuauugaagauucc

SEQ ID NO: 16829 - RNA, 21 nt, Artificial Sequence
  SAMD9 targeting guide sequence portion
uacugauuaugcuuuugaaau

SEQ ID NO: 16830 - RNA, 21 nt, Artificial Sequence
  SAMD9 targeting guide sequence portion
uacugauucuagaucauguca

SEQ ID NO: 16831 - RNA, 21 nt, Artificial Sequence
  SAMD9 targeting guide sequence portion
uacuucccuuucaccaccccc

SEQ ID NO: 16832 - RNA, 21 nt, Artificial Sequence
  SAMD9 targeting guide sequence portion
uacuuuaguauguaucucuaa

SEQ ID NO: 16833 - RNA, 21 nt, Artificial Sequence
  SAMD9 targeting guide sequence portion
uagaaaguaacaauaaagagu

SEQ ID NO: 16834 - RNA, 21 nt, Artificial Sequence
  SAMD9 targeting guide sequence portion
uagaaccgaaacaagauuagu

SEQ ID NO: 16835 - RNA, 21 nt, Artificial Sequence
  SAMD9 targeting guide sequence portion
uagaaucaguaauuuuguguu

SEQ ID NO: 16836 - RNA, 21 nt, Artificial Sequence
  SAMD9 targeting guide sequence portion
uagaauuuuuucacuggagga

SEQ ID NO: 16837 - RNA, 21 nt, Artificial Sequence
  SAMD9 targeting guide sequence portion
uagagauacauacuaaaguau

SEQ ID NO: 16838 - RNA, 21 nt, Artificial Sequence
  SAMD9 targeting guide sequence portion
uagauauuugaggauauuaag

SEQ ID NO: 16839 - RNA, 21 nt, Artificial Sequence
  SAMD9 targeting guide sequence portion
uagaucaugucauuuauuuac

SEQ ID NO: 16840 - RNA, 21 nt, Artificial Sequence
  SAMD9 targeting guide sequence portion
uaggcaaucagaaaaauuuga

SEQ ID NO: 16841 - RNA, 21 nt, Artificial Sequence
  SAMD9 targeting guide sequence portion
uaguaccuuaauauccucaaa

SEQ ID NO: 16842 - RNA, 21 nt, Artificial Sequence
  SAMD9 targeting guide sequence portion
uaguauguaucucuaaaaggc

SEQ ID NO: 16843 - RNA, 21 nt, Artificial Sequence
  SAMD9 targeting guide sequence portion
uaguccugaguuaacaauggc

SEQ ID NO: 16844 - RNA, 21 nt, Artificial Sequence
  SAMD9 targeting guide sequence portion
uagucuguguucaaauuuuuc

SEQ ID NO: 16845 - RNA, 21 nt, Artificial Sequence
  SAMD9 targeting guide sequence portion
uauaagcucacucuuuauugu

SEQ ID NO: 16846 - RNA, 21 nt, Artificial Sequence
  SAMD9 targeting guide sequence portion
uauaguaccuuaauauccuca

SEQ ID NO: 16847 - RNA, 21 nt, Artificial Sequence
  SAMD9 targeting guide sequence portion
uauauuauugaagauuccaug

SEQ ID NO: 16848 - RNA, 21 nt, Artificial Sequence
  SAMD9 targeting guide sequence portion
uauccagcuugcagccauugu

SEQ ID NO: 16849 - RNA, 21 nt, Artificial Sequence
  SAMD9 targeting guide sequence portion
uauccucaaauaucuagucug

SEQ ID NO: 16850 - RNA, 21 nt, Artificial Sequence
  SAMD9 targeting guide sequence portion
uaucuagucuguguucaaauu

SEQ ID NO: 16851 - RNA, 21 nt, Artificial Sequence
  SAMD9 targeting guide sequence portion
uaucucuaaaaggcaugaacu

SEQ ID NO: 16852 - RNA, 21 nt, Artificial Sequence
  SAMD9 targeting guide sequence portion
uaugcagaagcaagggaaaau

SEQ ID NO: 16853 - RNA, 21 nt, Artificial Sequence
  SAMD9 targeting guide sequence portion
uaugcuuuugaaauuuucucu

SEQ ID NO: 16854 - RNA, 21 nt, Artificial Sequence
  SAMD9 targeting guide sequence portion
uauggaguuaaaauuuuaugc

SEQ ID NO: 16855 - RNA, 21 nt, Artificial Sequence
  SAMD9 targeting guide sequence portion
uauguaucucuaaaaggcaug

SEQ ID NO: 16856 - RNA, 21 nt, Artificial Sequence
  SAMD9 targeting guide sequence portion
uauguuuuuuaaagaguucau

SEQ ID NO: 16857 - RNA, 21 nt, Artificial Sequence
  SAMD9 targeting guide sequence portion
uauuaggcaaucagaaaaauu

SEQ ID NO: 16858 - RNA, 21 nt, Artificial Sequence
  SAMD9 targeting guide sequence portion
uauuauugaagauuccauggu

SEQ ID NO: 16859 - RNA, 21 nt, Artificial Sequence
  SAMD9 targeting guide sequence portion
uauugaagauuccaugguuau

SEQ ID NO: 16860 - RNA, 21 nt, Artificial Sequence
  SAMD9 targeting guide sequence portion
uauuugaggauauuaagguac

SEQ ID NO: 16861 - RNA, 21 nt, Artificial Sequence
  SAMD9 targeting guide sequence portion
uauuuguaaauaaaugacaug

SEQ ID NO: 16862 - RNA, 21 nt, Artificial Sequence
  SAMD9 targeting guide sequence portion
ucaaaagcauaaucaguaaga

SEQ ID NO: 16863 - RNA, 21 nt, Artificial Sequence
  SAMD9 targeting guide sequence portion
ucaaaaucucauuagaauuuu

SEQ ID NO: 16864 - RNA, 21 nt, Artificial Sequence
  SAMD9 targeting guide sequence portion
ucaaauaucuagucuguguuc

SEQ ID NO: 16865 - RNA, 21 nt, Artificial Sequence
  SAMD9 targeting guide sequence portion
ucaaauuuuucugauugccua

SEQ ID NO: 16866 - RNA, 21 nt, Artificial Sequence
  SAMD9 targeting guide sequence portion
ucaauaauauaguaccuuaau

SEQ ID NO: 16867 - RNA, 21 nt, Artificial Sequence
  SAMD9 targeting guide sequence portion
ucaauuagaaaguaacaauaa

SEQ ID NO: 16868 - RNA, 21 nt, Artificial Sequence
  SAMD9 targeting guide sequence portion
ucaauuauuaggcaaucagaa

SEQ ID NO: 16869 - RNA, 21 nt, Artificial Sequence
  SAMD9 targeting guide sequence portion
ucaccacccccacaccccaaa

SEQ ID NO: 16870 - RNA, 21 nt, Artificial Sequence
  SAMD9 targeting guide sequence portion
ucacucuuuauuguuacuuuc

SEQ ID NO: 16871 - RNA, 21 nt, Artificial Sequence
  SAMD9 targeting guide sequence portion
ucacuggaggaagauuuuccc

SEQ ID NO: 16872 - RNA, 21 nt, Artificial Sequence
  SAMD9 targeting guide sequence portion
ucagaaaaauuugaacacaga

SEQ ID NO: 16873 - RNA, 21 nt, Artificial Sequence
  SAMD9 targeting guide sequence portion
ucagcacacuuuucucccucu

SEQ ID NO: 16874 - RNA, 21 nt, Artificial Sequence
  SAMD9 targeting guide sequence portion
ucaggacuaaucuuguuucgg

SEQ ID NO: 16875 - RNA, 21 nt, Artificial Sequence
  SAMD9 targeting guide sequence portion
ucaguaagagggagaaaagug

SEQ ID NO: 16876 - RNA, 21 nt, Artificial Sequence
  SAMD9 targeting guide sequence portion
ucaguaauuuuguguuugggg

SEQ ID NO: 16877 - RNA, 21 nt, Artificial Sequence
  SAMD9 targeting guide sequence portion
ucaugccuuuuagagauacau

SEQ ID NO: 16878 - RNA, 21 nt, Artificial Sequence
  SAMD9 targeting guide sequence portion
ucauuagaauuuuuucacugg

SEQ ID NO: 16879 - RNA, 21 nt, Artificial Sequence
  SAMD9 targeting guide sequence portion
uccagcuugcagccauuguua

SEQ ID NO: 16880 - RNA, 21 nt, Artificial Sequence
  SAMD9 targeting guide sequence portion
uccagugaaaaaauucuaaug

SEQ ID NO: 16881 - RNA, 21 nt, Artificial Sequence
  SAMD9 targeting guide sequence portion
uccauaacuuauaagcucacu

SEQ ID NO: 16882 - RNA, 21 nt, Artificial Sequence
  SAMD9 targeting guide sequence portion
uccaugguuauguuuuuuaaa

SEQ ID NO: 16883 - RNA, 21 nt, Artificial Sequence
  SAMD9 targeting guide sequence portion
uccauguauccagcuugcagc

SEQ ID NO: 16884 - RNA, 21 nt, Artificial Sequence
  SAMD9 targeting guide sequence portion
ucccucuuacugauuaugcuu

SEQ ID NO: 16885 - RNA, 21 nt, Artificial Sequence
  SAMD9 targeting guide sequence portion
ucccuugcuucugcauaaaau

SEQ ID NO: 16886 - RNA, 21 nt, Artificial Sequence
  SAMD9 targeting guide sequence portion
ucccuuucaccacccccacac

SEQ ID NO: 16887 - RNA, 21 nt, Artificial Sequence
  SAMD9 targeting guide sequence portion
uccucaaauaucuagucugug

SEQ ID NO: 16888 - RNA, 21 nt, Artificial Sequence
  SAMD9 targeting guide sequence portion
uccuccagugaaaaaauucua

SEQ ID NO: 16889 - RNA, 21 nt, Artificial Sequence
  SAMD9 targeting guide sequence portion
uccugaguuaacaauggcugc

SEQ ID NO: 16890 - RNA, 21 nt, Artificial Sequence
  SAMD9 targeting guide sequence portion
ucgguucuacuucccuuucac

SEQ ID NO: 16891 - RNA, 21 nt, Artificial Sequence
  SAMD9 targeting guide sequence portion
ucuaaaaggcaugaacucuuu

SEQ ID NO: 16892 - RNA, 21 nt, Artificial Sequence
  SAMD9 targeting guide sequence portion
ucuaaaaucaauuauuaggca

SEQ ID NO: 16893 - RNA, 21 nt, Artificial Sequence
  SAMD9 targeting guide sequence portion
ucuaaauguuuuacaagagaa

SEQ ID NO: 16894 - RNA, 21 nt, Artificial Sequence
  SAMD9 targeting guide sequence portion
ucuaaugagauuuugaagaca

SEQ ID NO: 16895 - RNA, 21 nt, Artificial Sequence
  SAMD9 targeting guide sequence portion
ucuacuucccuuucaccaccc

SEQ ID NO: 16896 - RNA, 21 nt, Artificial Sequence
  SAMD9 targeting guide sequence portion
ucuagaaucaguaauuuugug

SEQ ID NO: 16897 - RNA, 21 nt, Artificial Sequence
  SAMD9 targeting guide sequence portion
ucuagaucaugucauuuauuu

SEQ ID NO: 16898 - RNA, 21 nt, Artificial Sequence
  SAMD9 targeting guide sequence portion
ucuagucuguguucaaauuuu

SEQ ID NO: 16899 - RNA, 21 nt, Artificial Sequence
  SAMD9 targeting guide sequence portion
ucucauuagaauuuuuucacu

SEQ ID NO: 16900 - RNA, 21 nt, Artificial Sequence
  SAMD9 targeting guide sequence portion
ucucccucuuacugauuaugc

SEQ ID NO: 16901 - RNA, 21 nt, Artificial Sequence
  SAMD9 targeting guide sequence portion
ucucuaaaaggcaugaacucu

SEQ ID NO: 16902 - RNA, 21 nt, Artificial Sequence
  SAMD9 targeting guide sequence portion
ucucuuguaaaacauuuagaa

SEQ ID NO: 16903 - RNA, 21 nt, Artificial Sequence
  SAMD9 targeting guide sequence portion
ucugauugccuaauaauugau

SEQ ID NO: 16904 - RNA, 21 nt, Artificial Sequence
  SAMD9 targeting guide sequence portion
ucugcauaaaauuuuaacucc

SEQ ID NO: 16905 - RNA, 21 nt, Artificial Sequence
  SAMD9 targeting guide sequence portion
ucugucuucaaaaucucauua

SEQ ID NO: 16906 - RNA, 21 nt, Artificial Sequence
  SAMD9 targeting guide sequence portion
ucuguguucaaauuuuucuga

SEQ ID NO: 16907 - RNA, 21 nt, Artificial Sequence
  SAMD9 targeting guide sequence portion
ucuuacugauuaugcuuuuga

SEQ ID NO: 16908 - RNA, 21 nt, Artificial Sequence
  SAMD9 targeting guide sequence portion
ucuucaaaaucucauuagaau

SEQ ID NO: 16909 - RNA, 21 nt, Artificial Sequence
  SAMD9 targeting guide sequence portion
ucuucaauaauauaguaccuu

SEQ ID NO: 16910 - RNA, 21 nt, Artificial Sequence
  SAMD9 targeting guide sequence portion
ucuuccuccagugaaaaaauu

SEQ ID NO: 16911 - RNA, 21 nt, Artificial Sequence
  SAMD9 targeting guide sequence portion
ucuuguuucgguucuacuucc

SEQ ID NO: 16912 - RNA, 21 nt, Artificial Sequence
  SAMD9 targeting guide sequence portion
ucuuuaaaaaacauaaccaug

SEQ ID NO: 16913 - RNA, 21 nt, Artificial Sequence
  SAMD9 targeting guide sequence portion
ucuuuauuguuacuuucuaau

SEQ ID NO: 16914 - RNA, 21 nt, Artificial Sequence
  SAMD9 targeting guide sequence portion
ugaaaaaauucuaaugagauu

SEQ ID NO: 16915 - RNA, 21 nt, Artificial Sequence
  SAMD9 targeting guide sequence portion
ugaaagggaaguagaaccgaa

SEQ ID NO: 16916 - RNA, 21 nt, Artificial Sequence
  SAMD9 targeting guide sequence portion
ugaaauuuucucuuguaaaac

SEQ ID NO: 16917 - RNA, 21 nt, Artificial Sequence
  SAMD9 targeting guide sequence portion
ugaacacagacuagauauuug

SEQ ID NO: 16918 - RNA, 21 nt, Artificial Sequence
  SAMD9 targeting guide sequence portion
ugaacucuuuaaaaaacauaa

SEQ ID NO: 16919 - RNA, 21 nt, Artificial Sequence
  SAMD9 targeting guide sequence portion
ugaagacagaaacaaaucaca

SEQ ID NO: 16920 - RNA, 21 nt, Artificial Sequence
  SAMD9 targeting guide sequence portion
ugaagauuccaugguuauguu

SEQ ID NO: 16921 - RNA, 21 nt, Artificial Sequence
  SAMD9 targeting guide sequence portion
ugaauuccauguauccagcuu

SEQ ID NO: 16922 - RNA, 21 nt, Artificial Sequence
  SAMD9 targeting guide sequence portion
ugacaugaucuagaaucagua

SEQ ID NO: 16923 - RNA, 21 nt, Artificial Sequence
  SAMD9 targeting guide sequence portion
ugagauuuugaagacagaaac

SEQ ID NO: 16924 - RNA, 21 nt, Artificial Sequence
  SAMD9 targeting guide sequence portion
ugagcuuauaaguuauggagu

SEQ ID NO: 16925 - RNA, 21 nt, Artificial Sequence
  SAMD9 targeting guide sequence portion
ugaggauauuaagguacuaua

SEQ ID NO: 16926 - RNA, 21 nt, Artificial Sequence
  SAMD9 targeting guide sequence portion
ugaguuaacaauggcugcaag

SEQ ID NO: 16927 - RNA, 21 nt, Artificial Sequence
  SAMD9 targeting guide sequence portion
ugaucuagaaucaguaauuuu

SEQ ID NO: 16928 - RNA, 21 nt, Artificial Sequence
  SAMD9 targeting guide sequence portion
ugauuaugcuuuugaaauuuu

SEQ ID NO: 16929 - RNA, 21 nt, Artificial Sequence
  SAMD9 targeting guide sequence portion
ugauucuagaucaugucauuu

SEQ ID NO: 16930 - RNA, 21 nt, Artificial Sequence
  SAMD9 targeting guide sequence portion
ugauugccuaauaauugauuu

SEQ ID NO: 16931 - RNA, 21 nt, Artificial Sequence
  SAMD9 targeting guide sequence portion
ugauuuguuucugucuucaaa

SEQ ID NO: 16932 - RNA, 21 nt, Artificial Sequence
  SAMD9 targeting guide sequence portion
ugcaagcuggauacauggaau

SEQ ID NO: 16933 - RNA, 21 nt, Artificial Sequence
  SAMD9 targeting guide sequence portion
ugcagaagcaagggaaaaucu

SEQ ID NO: 16934 - RNA, 21 nt, Artificial Sequence
  SAMD9 targeting guide sequence portion
ugcagccauuguuaacucagg

SEQ ID NO: 16935 - RNA, 21 nt, Artificial Sequence
  SAMD9 targeting guide sequence portion
ugcauaaaauuuuaacuccau

SEQ ID NO: 16936 - RNA, 21 nt, Artificial Sequence
  SAMD9 targeting guide sequence portion
ugccuuuuagagauacauacu

SEQ ID NO: 16937 - RNA, 21 nt, Artificial Sequence
  SAMD9 targeting guide sequence portion
ugcugaauuccauguauccag

SEQ ID NO: 16938 - RNA, 21 nt, Artificial Sequence
  SAMD9 targeting guide sequence portion
ugcuucugcauaaaauuuuaa

SEQ ID NO: 16939 - RNA, 21 nt, Artificial Sequence
  SAMD9 targeting guide sequence portion
ugcuuuugaaauuuucucuug

SEQ ID NO: 16940 - RNA, 21 nt, Artificial Sequence
  SAMD9 targeting guide sequence portion
uggaaucuucaauaauauagu

SEQ ID NO: 16941 - RNA, 21 nt, Artificial Sequence
  SAMD9 targeting guide sequence portion
uggaauucagcacacuuuucu

SEQ ID NO: 16942 - RNA, 21 nt, Artificial Sequence
  SAMD9 targeting guide sequence portion
uggaggaagauuuucccuugc

SEQ ID NO: 16943 - RNA, 21 nt, Artificial Sequence
  SAMD9 targeting guide sequence portion
uggaguuaaaauuuuaugcag

SEQ ID NO: 16944 - RNA, 21 nt, Artificial Sequence
  SAMD9 targeting guide sequence portion
uggauacauggaauucagcac

SEQ ID NO: 16945 - RNA, 21 nt, Artificial Sequence
  SAMD9 targeting guide sequence portion
uggcugcaagcuggauacaug

SEQ ID NO: 16946 - RNA, 21 nt, Artificial Sequence
  SAMD9 targeting guide sequence portion
uggggguggugaaagggaagu

SEQ ID NO: 16947 - RNA, 21 nt, Artificial Sequence
  SAMD9 targeting guide sequence portion
ugggguguggggguggugaaa

SEQ ID NO: 16948 - RNA, 21 nt, Artificial Sequence
  SAMD9 targeting guide sequence portion
uggugaaagggaaguagaacc

SEQ ID NO: 16949 - RNA, 21 nt, Artificial Sequence
  SAMD9 targeting guide sequence portion
ugguuauguuuuuuaaagagu

SEQ ID NO: 16950 - RNA, 21 nt, Artificial Sequence
  SAMD9 targeting guide sequence portion
uguaaauaaaugacaugaucu

SEQ ID NO: 16951 - RNA, 21 nt, Artificial Sequence
  SAMD9 targeting guide sequence portion
uguauccagcuugcagccauu

SEQ ID NO: 16952 - RNA, 21 nt, Artificial Sequence
  SAMD9 targeting guide sequence portion
uguaucucuaaaaggcaugaa

SEQ ID NO: 16953 - RNA, 21 nt, Artificial Sequence
  SAMD9 targeting guide sequence portion
ugucaauuagaaaguaacaau

SEQ ID NO: 16954 - RNA, 21 nt, Artificial Sequence
  SAMD9 targeting guide sequence portion
ugucuucaaaaucucauuaga

SEQ ID NO: 16955 - RNA, 21 nt, Artificial Sequence
  SAMD9 targeting guide sequence portion
ugugauuuguuucugucuuca

SEQ ID NO: 16956 - RNA, 21 nt, Artificial Sequence
  SAMD9 targeting guide sequence portion
ugugcugaauuccauguaucc

SEQ ID NO: 16957 - RNA, 21 nt, Artificial Sequence
  SAMD9 targeting guide sequence portion
uguggggguggugaaagggaa

SEQ ID NO: 16958 - RNA, 21 nt, Artificial Sequence
  SAMD9 targeting guide sequence portion
uguguucaaauuuuucugauu

SEQ ID NO: 16959 - RNA, 21 nt, Artificial Sequence
  SAMD9 targeting guide sequence portion
uguguuuggggugugggggug

SEQ ID NO: 16960 - RNA, 21 nt, Artificial Sequence
  SAMD9 targeting guide sequence portion
uguuaacucaggacuaaucuu

SEQ ID NO: 16961 - RNA, 21 nt, Artificial Sequence
  SAMD9 targeting guide sequence portion
uguucaaauuuuucugauugc

SEQ ID NO: 16962 - RNA, 21 nt, Artificial Sequence
  SAMD9 targeting guide sequence portion
uguuucgguucuacuucccuu

SEQ ID NO: 16963 - RNA, 21 nt, Artificial Sequence
  SAMD9 targeting guide sequence portion
uguuucugucuucaaaaucuc

SEQ ID NO: 16964 - RNA, 21 nt, Artificial Sequence
  SAMD9 targeting guide sequence portion
uguuugggguguggggguggu

SEQ ID NO: 16965 - RNA, 21 nt, Artificial Sequence
  SAMD9 targeting guide sequence portion
uguuuuacaagagaaaauuuc

SEQ ID NO: 16966 - RNA, 21 nt, Artificial Sequence
  SAMD9 targeting guide sequence portion
uguuuucuaaauguuuuacaa

SEQ ID NO: 16967 - RNA, 21 nt, Artificial Sequence
  SAMD9 targeting guide sequence portion
uguuuuuuaaagaguucaugc

SEQ ID NO: 16968 - RNA, 21 nt, Artificial Sequence
  SAMD9 targeting guide sequence portion
uuaaaaaacauaaccauggaa

SEQ ID NO: 16969 - RNA, 21 nt, Artificial Sequence
  SAMD9 targeting guide sequence portion
uuaaaauuuuaugcagaagca

SEQ ID NO: 16970 - RNA, 21 nt, Artificial Sequence
  SAMD9 targeting guide sequence portion
uuaaagaguucaugccuuuua

SEQ ID NO: 16971 - RNA, 21 nt, Artificial Sequence
  SAMD9 targeting guide sequence portion
uuaacaauggcugcaagcugg

SEQ ID NO: 16972 - RNA, 21 nt, Artificial Sequence
  SAMD9 targeting guide sequence portion
uuaacucaggacuaaucuugu

SEQ ID NO: 16973 - RNA, 21 nt, Artificial Sequence
  SAMD9 targeting guide sequence portion
uuaacuccauaacuuauaagc

SEQ ID NO: 16974 - RNA, 21 nt, Artificial Sequence
  SAMD9 targeting guide sequence portion
uuaagguacuauauuauugaa

SEQ ID NO: 16975 - RNA, 21 nt, Artificial Sequence
  SAMD9 targeting guide sequence portion
uuaauauccucaaauaucuag

SEQ ID NO: 16976 - RNA, 21 nt, Artificial Sequence
  SAMD9 targeting guide sequence portion
uuacaaauacuuuaguaugua

SEQ ID NO: 16977 - RNA, 21 nt, Artificial Sequence
  SAMD9 targeting guide sequence portion
uuacaagagaaaauuucaaaa

SEQ ID NO: 16978 - RNA, 21 nt, Artificial Sequence
  SAMD9 targeting guide sequence portion
uuacugauuaugcuuuugaaa

SEQ ID NO: 16979 - RNA, 21 nt, Artificial Sequence
  SAMD9 targeting guide sequence portion
uuacugauucuagaucauguc

SEQ ID NO: 16980 - RNA, 21 nt, Artificial Sequence
  SAMD9 targeting guide sequence portion
uuagaaaguaacaauaaagag

SEQ ID NO: 16981 - RNA, 21 nt, Artificial Sequence
  SAMD9 targeting guide sequence portion
uuagaauuuuuucacuggagg

SEQ ID NO: 16982 - RNA, 21 nt, Artificial Sequence
  SAMD9 targeting guide sequence portion
uuagagauacauacuaaagua

SEQ ID NO: 16983 - RNA, 21 nt, Artificial Sequence
  SAMD9 targeting guide sequence portion
uuaggcaaucagaaaaauuug

SEQ ID NO: 16984 - RNA, 21 nt, Artificial Sequence
  SAMD9 targeting guide sequence portion
uuaguauguaucucuaaaagg

SEQ ID NO: 16985 - RNA, 21 nt, Artificial Sequence
  SAMD9 targeting guide sequence portion
uuaguccugaguuaacaaugg

SEQ ID NO: 16986 - RNA, 21 nt, Artificial Sequence
  SAMD9 targeting guide sequence portion
uuauaagcucacucuuuauug

SEQ ID NO: 16987 - RNA, 21 nt, Artificial Sequence
  SAMD9 targeting guide sequence portion
uuaugcagaagcaagggaaaa

SEQ ID NO: 16988 - RNA, 21 nt, Artificial Sequence
  SAMD9 targeting guide sequence portion
uuaugcuuuugaaauuuucuc

SEQ ID NO: 16989 - RNA, 21 nt, Artificial Sequence
  SAMD9 targeting guide sequence portion
uuauggaguuaaaauuuuaug

SEQ ID NO: 16990 - RNA, 21 nt, Artificial Sequence
  SAMD9 targeting guide sequence portion
uuauguuuuuuaaagaguuca

SEQ ID NO: 16991 - RNA, 21 nt, Artificial Sequence
  SAMD9 targeting guide sequence portion
uuauuaggcaaucagaaaaau

SEQ ID NO: 16992 - RNA, 21 nt, Artificial Sequence
  SAMD9 targeting guide sequence portion
uuauugaagauuccaugguua

SEQ ID NO: 16993 - RNA, 21 nt, Artificial Sequence
  SAMD9 targeting guide sequence portion
uucaaaagcauaaucaguaag

SEQ ID NO: 16994 - RNA, 21 nt, Artificial Sequence
  SAMD9 targeting guide sequence portion
uucaaaaucucauuagaauuu

SEQ ID NO: 16995 - RNA, 21 nt, Artificial Sequence
  SAMD9 targeting guide sequence portion
uucaaauuuuucugauugccu

SEQ ID NO: 16996 - RNA, 21 nt, Artificial Sequence
  SAMD9 targeting guide sequence portion
uucaauaauauaguaccuuaa

SEQ ID NO: 16997 - RNA, 21 nt, Artificial Sequence
  SAMD9 targeting guide sequence portion
uucaccacccccacaccccaa

SEQ ID NO: 16998 - RNA, 21 nt, Artificial Sequence
  SAMD9 targeting guide sequence portion
uucacuggaggaagauuuucc

SEQ ID NO: 16999 - RNA, 21 nt, Artificial Sequence
  SAMD9 targeting guide sequence portion
uucagcacacuuuucucccuc

SEQ ID NO: 17000 - RNA, 21 nt, Artificial Sequence
  SAMD9 targeting guide sequence portion
uucaugccuuuuagagauaca

SEQ ID NO: 17001 - RNA, 21 nt, Artificial Sequence
  SAMD9 targeting guide sequence portion
uuccaugguuauguuuuuuaa

SEQ ID NO: 17002 - RNA, 21 nt, Artificial Sequence
  SAMD9 targeting guide sequence portion
uuccauguauccagcuugcag

SEQ ID NO: 17003 - RNA, 21 nt, Artificial Sequence
  SAMD9 targeting guide sequence portion
uucccuugcuucugcauaaaa

SEQ ID NO: 17004 - RNA, 21 nt, Artificial Sequence
  SAMD9 targeting guide sequence portion
uucccuuucaccacccccaca

SEQ ID NO: 17005 - RNA, 21 nt, Artificial Sequence
  SAMD9 targeting guide sequence portion
uuccuccagugaaaaaauucu

SEQ ID NO: 17006 - RNA, 21 nt, Artificial Sequence
  SAMD9 targeting guide sequence portion
uucgguucuacuucccuuuca

SEQ ID NO: 17007 - RNA, 21 nt, Artificial Sequence
  SAMD9 targeting guide sequence portion
uucuaaugagauuuugaagac

SEQ ID NO: 17008 - RNA, 21 nt, Artificial Sequence
  SAMD9 targeting guide sequence portion
uucuacuucccuuucaccacc

SEQ ID NO: 17009 - RNA, 21 nt, Artificial Sequence
  SAMD9 targeting guide sequence portion
uucuagaucaugucauuuauu

SEQ ID NO: 17010 - RNA, 21 nt, Artificial Sequence
  SAMD9 targeting guide sequence portion
uucucccucuuacugauuaug

SEQ ID NO: 17011 - RNA, 21 nt, Artificial Sequence
  SAMD9 targeting guide sequence portion
uucucuuguaaaacauuuaga

SEQ ID NO: 17012 - RNA, 21 nt, Artificial Sequence
  SAMD9 targeting guide sequence portion
uucugauugccuaauaauuga

SEQ ID NO: 17013 - RNA, 21 nt, Artificial Sequence
  SAMD9 targeting guide sequence portion
uucugcauaaaauuuuaacuc

SEQ ID NO: 17014 - RNA, 21 nt, Artificial Sequence
  SAMD9 targeting guide sequence portion
uucugucuucaaaaucucauu

SEQ ID NO: 17015 - RNA, 21 nt, Artificial Sequence
  SAMD9 targeting guide sequence portion
uugaacacagacuagauauuu

SEQ ID NO: 17016 - RNA, 21 nt, Artificial Sequence
  SAMD9 targeting guide sequence portion
uugaagacagaaacaaaucac

SEQ ID NO: 17017 - RNA, 21 nt, Artificial Sequence
  SAMD9 targeting guide sequence portion
uugaagauuccaugguuaugu

SEQ ID NO: 17018 - RNA, 21 nt, Artificial Sequence
  SAMD9 targeting guide sequence portion
uugaggauauuaagguacuau

SEQ ID NO: 17019 - RNA, 21 nt, Artificial Sequence
  SAMD9 targeting guide sequence portion
uugcagccauuguuaacucag

SEQ ID NO: 17020 - RNA, 21 nt, Artificial Sequence
  SAMD9 targeting guide sequence portion
uugccuaauaauugauuuuag

SEQ ID NO: 17021 - RNA, 21 nt, Artificial Sequence
  SAMD9 targeting guide sequence portion
uugcuucugcauaaaauuuua

SEQ ID NO: 17022 - RNA, 21 nt, Artificial Sequence
  SAMD9 targeting guide sequence portion
uugggguguggggguggugaa

SEQ ID NO: 17023 - RNA, 21 nt, Artificial Sequence
  SAMD9 targeting guide sequence portion
uuguaaauaaaugacaugauc

SEQ ID NO: 17024 - RNA, 21 nt, Artificial Sequence
  SAMD9 targeting guide sequence portion
uugucaauuagaaaguaacaa

SEQ ID NO: 17025 - RNA, 21 nt, Artificial Sequence
  SAMD9 targeting guide sequence portion
uuguguuuggggugugggggu

SEQ ID NO: 17026 - RNA, 21 nt, Artificial Sequence
  SAMD9 targeting guide sequence portion
uuguuaacucaggacuaaucu

SEQ ID NO: 17027 - RNA, 21 nt, Artificial Sequence
  SAMD9 targeting guide sequence portion
uuguuucgguucuacuucccu

SEQ ID NO: 17028 - RNA, 21 nt, Artificial Sequence
  SAMD9 targeting guide sequence portion
uuguuucugucuucaaaaucu

SEQ ID NO: 17029 - RNA, 21 nt, Artificial Sequence
  SAMD9 targeting guide sequence portion
uuguuuucuaaauguuuuaca

SEQ ID NO: 17030 - RNA, 21 nt, Artificial Sequence
  SAMD9 targeting guide sequence portion
uuuaaaaaacauaaccaugga

SEQ ID NO: 17031 - RNA, 21 nt, Artificial Sequence
  SAMD9 targeting guide sequence portion
uuuaaagaguucaugccuuuu

SEQ ID NO: 17032 - RNA, 21 nt, Artificial Sequence
  SAMD9 targeting guide sequence portion
uuuaacuccauaacuuauaag

SEQ ID NO: 17033 - RNA, 21 nt, Artificial Sequence
  SAMD9 targeting guide sequence portion
uuuacaaauacuuuaguaugu

SEQ ID NO: 17034 - RNA, 21 nt, Artificial Sequence
  SAMD9 targeting guide sequence portion
uuuacaagagaaaauuucaaa

SEQ ID NO: 17035 - RNA, 21 nt, Artificial Sequence
  SAMD9 targeting guide sequence portion
uuuagagauacauacuaaagu

SEQ ID NO: 17036 - RNA, 21 nt, Artificial Sequence
  SAMD9 targeting guide sequence portion
uuuaguauguaucucuaaaag

SEQ ID NO: 17037 - RNA, 21 nt, Artificial Sequence
  SAMD9 targeting guide sequence portion
uuuaugcagaagcaagggaaa

SEQ ID NO: 17038 - RNA, 21 nt, Artificial Sequence
  SAMD9 targeting guide sequence portion
uuucaaaagcauaaucaguaa

SEQ ID NO: 17039 - RNA, 21 nt, Artificial Sequence
  SAMD9 targeting guide sequence portion
uuucaccacccccacacccca

SEQ ID NO: 17040 - RNA, 21 nt, Artificial Sequence
  SAMD9 targeting guide sequence portion
uuucacuggaggaagauuuuc

SEQ ID NO: 17041 - RNA, 21 nt, Artificial Sequence
  SAMD9 targeting guide sequence portion
uuucccuugcuucugcauaaa

SEQ ID NO: 17042 - RNA, 21 nt, Artificial Sequence
  SAMD9 targeting guide sequence portion
uuucgguucuacuucccuuuc

SEQ ID NO: 17043 - RNA, 21 nt, Artificial Sequence
  SAMD9 targeting guide sequence portion
uuucucccucuuacugauuau

SEQ ID NO: 17044 - RNA, 21 nt, Artificial Sequence
  SAMD9 targeting guide sequence portion
uuucucuuguaaaacauuuag

SEQ ID NO: 17045 - RNA, 21 nt, Artificial Sequence
  SAMD9 targeting guide sequence portion
uuucugauugccuaauaauug

SEQ ID NO: 17046 - RNA, 21 nt, Artificial Sequence
  SAMD9 targeting guide sequence portion
uuucugucuucaaaaucucau

SEQ ID NO: 17047 - RNA, 21 nt, Artificial Sequence
  SAMD9 targeting guide sequence portion
uuugaacacagacuagauauu

SEQ ID NO: 17048 - RNA, 21 nt, Artificial Sequence
  SAMD9 targeting guide sequence portion
uuugaagacagaaacaaauca

SEQ ID NO: 17049 - RNA, 21 nt, Artificial Sequence
  SAMD9 targeting guide sequence portion
uuugaggauauuaagguacua

SEQ ID NO: 17050 - RNA, 21 nt, Artificial Sequence
  SAMD9 targeting guide sequence portion
uuuggggugugggggugguga

SEQ ID NO: 17051 - RNA, 21 nt, Artificial Sequence
  SAMD9 targeting guide sequence portion
uuuguaaauaaaugacaugau

SEQ ID NO: 17052 - RNA, 21 nt, Artificial Sequence
  SAMD9 targeting guide sequence portion
uuugucaauuagaaaguaaca

SEQ ID NO: 17053 - RNA, 21 nt, Artificial Sequence
  SAMD9 targeting guide sequence portion
uuuguguuugggguguggggg

SEQ ID NO: 17054 - RNA, 21 nt, Artificial Sequence
  SAMD9 targeting guide sequence portion
uuuguuucugucuucaaaauc

SEQ ID NO: 17055 - RNA, 21 nt, Artificial Sequence
  SAMD9 targeting guide sequence portion
uuuguuuucuaaauguuuuac

SEQ ID NO: 17056 - RNA, 21 nt, Artificial Sequence
  SAMD9 targeting guide sequence portion
uuuuaaagaguucaugccuuu

SEQ ID NO: 17057 - RNA, 21 nt, Artificial Sequence
  SAMD9 targeting guide sequence portion
uuuuaacuccauaacuuauaa

SEQ ID NO: 17058 - RNA, 21 nt, Artificial Sequence
  SAMD9 targeting guide sequence portion
uuuuacaagagaaaauuucaa

SEQ ID NO: 17059 - RNA, 21 nt, Artificial Sequence
  SAMD9 targeting guide sequence portion
uuuuagagauacauacuaaag

SEQ ID NO: 17060 - RNA, 21 nt, Artificial Sequence
  SAMD9 targeting guide sequence portion
uuuuaugcagaagcaagggaa

SEQ ID NO: 17061 - RNA, 21 nt, Artificial Sequence
  SAMD9 targeting guide sequence portion
uuuucacuggaggaagauuuu

SEQ ID NO: 17062 - RNA, 21 nt, Artificial Sequence
  SAMD9 targeting guide sequence portion
uuuucccuugcuucugcauaa

SEQ ID NO: 17063 - RNA, 21 nt, Artificial Sequence
  SAMD9 targeting guide sequence portion
uuuucucccucuuacugauua

SEQ ID NO: 17064 - RNA, 21 nt, Artificial Sequence
  SAMD9 targeting guide sequence portion
uuuucucuuguaaaacauuua

SEQ ID NO: 17065 - RNA, 21 nt, Artificial Sequence
  SAMD9 targeting guide sequence portion
uuuucugauugccuaauaauu

SEQ ID NO: 17066 - RNA, 21 nt, Artificial Sequence
  SAMD9 targeting guide sequence portion
uuuugaagacagaaacaaauc

SEQ ID NO: 17067 - RNA, 21 nt, Artificial Sequence
  SAMD9 targeting guide sequence portion
uuuuguguuuggggugugggg

SEQ ID NO: 17068 - RNA, 21 nt, Artificial Sequence
  SAMD9 targeting guide sequence portion
uuuuguuuucuaaauguuuua

SEQ ID NO: 17069 - RNA, 21 nt, Artificial Sequence
  SAMD9 targeting guide sequence portion
uuuuuaaagaguucaugccuu

SEQ ID NO: 17070 - RNA, 21 nt, Artificial Sequence
  SAMD9 targeting guide sequence portion
uuuuucacuggaggaagauuu

SEQ ID NO: 17071 - RNA, 21 nt, Artificial Sequence
  SAMD9 targeting guide sequence portion
uuuuucugauugccuaauaau

SEQ ID NO: 17072 - RNA, 21 nt, Artificial Sequence
  SAMD9 targeting guide sequence portion
uuuuuuaaagaguucaugccu

SEQ ID NO: 17073 - RNA, 21 nt, Artificial Sequence
  SAMD9 targeting guide sequence portion
uuuuuucacuggaggaagauu

SEQ ID NO: 17074 - RNA, 22 nt, Artificial Sequence
  SAMD9 targeting guide sequence portion
aaaaaacauaaccauggaaucu

SEQ ID NO: 17075 - RNA, 22 nt, Artificial Sequence
  SAMD9 targeting guide sequence portion
aaaaaaugugauuuguuucugu

SEQ ID NO: 17076 - RNA, 22 nt, Artificial Sequence
  SAMD9 targeting guide sequence portion
aaaaaauucuaaugagauuuug

SEQ ID NO: 17077 - RNA, 22 nt, Artificial Sequence
  SAMD9 targeting guide sequence portion
aaaaacauaaccauggaaucuu

SEQ ID NO: 17078 - RNA, 22 nt, Artificial Sequence
  SAMD9 targeting guide sequence portion
aaaaaugugauuuguuucuguc

SEQ ID NO: 17079 - RNA, 22 nt, Artificial Sequence
  SAMD9 targeting guide sequence portion
aaaaauucuaaugagauuuuga

SEQ ID NO: 17080 - RNA, 22 nt, Artificial Sequence
  SAMD9 targeting guide sequence portion
aaaaauuugaacacagacuaga

SEQ ID NO: 17081 - RNA, 22 nt, Artificial Sequence
  SAMD9 targeting guide sequence portion
aaaacauaaccauggaaucuuc

SEQ ID NO: 17082 - RNA, 22 nt, Artificial Sequence
  SAMD9 targeting guide sequence portion
aaaagcauaaucaguaagaggg

SEQ ID NO: 17083 - RNA, 22 nt, Artificial Sequence
  SAMD9 targeting guide sequence portion
aaaaggcaugaacucuuuaaaa

SEQ ID NO: 17084 - RNA, 22 nt, Artificial Sequence
  SAMD9 targeting guide sequence portion
aaaagugugcugaauuccaugu

SEQ ID NO: 17085 - RNA, 22 nt, Artificial Sequence
  SAMD9 targeting guide sequence portion
aaaaucaauuauuaggcaauca

SEQ ID NO: 17086 - RNA, 22 nt, Artificial Sequence
  SAMD9 targeting guide sequence portion
aaaaucuaaaaucaauuauuag

SEQ ID NO: 17087 - RNA, 22 nt, Artificial Sequence
  SAMD9 targeting guide sequence portion
aaaaucucauuagaauuuuuuc

SEQ ID NO: 17088 - RNA, 22 nt, Artificial Sequence
  SAMD9 targeting guide sequence portion
aaaaucuuccuccagugaaaaa

SEQ ID NO: 17089 - RNA, 22 nt, Artificial Sequence
  SAMD9 targeting guide sequence portion
aaaaugugauuuguuucugucu

SEQ ID NO: 17090 - RNA, 22 nt, Artificial Sequence
  SAMD9 targeting guide sequence portion
aaaauuacugauucuagaucau

SEQ ID NO: 17091 - RNA, 22 nt, Artificial Sequence
  SAMD9 targeting guide sequence portion
aaaauucuaaugagauuuugaa

SEQ ID NO: 17092 - RNA, 22 nt, Artificial Sequence
  SAMD9 targeting guide sequence portion
aaaauuucaaaagcauaaucag

SEQ ID NO: 17093 - RNA, 22 nt, Artificial Sequence
  SAMD9 targeting guide sequence portion
aaaauuugaacacagacuagau

SEQ ID NO: 17094 - RNA, 22 nt, Artificial Sequence
  SAMD9 targeting guide sequence portion
aaaauuuuaacuccauaacuua

SEQ ID NO: 17095 - RNA, 22 nt, Artificial Sequence
  SAMD9 targeting guide sequence portion
aaaauuuuaugcagaagcaagg

SEQ ID NO: 17096 - RNA, 22 nt, Artificial Sequence
  SAMD9 targeting guide sequence portion
aaacaagauuaguccugaguua

SEQ ID NO: 17097 - RNA, 22 nt, Artificial Sequence
  SAMD9 targeting guide sequence portion
aaacacaaaauuacugauucua

SEQ ID NO: 17098 - RNA, 22 nt, Artificial Sequence
  SAMD9 targeting guide sequence portion
aaacauaaccauggaaucuuca

SEQ ID NO: 17099 - RNA, 22 nt, Artificial Sequence
  SAMD9 targeting guide sequence portion
aaagagugagcuuauaaguuau

SEQ ID NO: 17100 - RNA, 22 nt, Artificial Sequence
  SAMD9 targeting guide sequence portion
aaagaguucaugccuuuuagag

SEQ ID NO: 17101 - RNA, 22 nt, Artificial Sequence
  SAMD9 targeting guide sequence portion
aaagcauaaucaguaagaggga

SEQ ID NO: 17102 - RNA, 22 nt, Artificial Sequence
  SAMD9 targeting guide sequence portion
aaaggcaugaacucuuuaaaaa

SEQ ID NO: 17103 - RNA, 22 nt, Artificial Sequence
  SAMD9 targeting guide sequence portion
aaagggaaguagaaccgaaaca

SEQ ID NO: 17104 - RNA, 22 nt, Artificial Sequence
  SAMD9 targeting guide sequence portion
aaaguaacaauaaagagugagc

SEQ ID NO: 17105 - RNA, 22 nt, Artificial Sequence
  SAMD9 targeting guide sequence portion
aaaguauuuguaaauaaaugac

SEQ ID NO: 17106 - RNA, 22 nt, Artificial Sequence
  SAMD9 targeting guide sequence portion
aaagugugcugaauuccaugua

SEQ ID NO: 17107 - RNA, 22 nt, Artificial Sequence
  SAMD9 targeting guide sequence portion
aaauaaaugacaugaucuagaa

SEQ ID NO: 17108 - RNA, 22 nt, Artificial Sequence
  SAMD9 targeting guide sequence portion
aaauacuuuaguauguaucucu

SEQ ID NO: 17109 - RNA, 22 nt, Artificial Sequence
  SAMD9 targeting guide sequence portion
aaauaucuagucuguguucaaa

SEQ ID NO: 17110 - RNA, 22 nt, Artificial Sequence
  SAMD9 targeting guide sequence portion
aaaucaauuauuaggcaaucag

SEQ ID NO: 17111 - RNA, 22 nt, Artificial Sequence
  SAMD9 targeting guide sequence portion
aaaucuaaaaucaauuauuagg

SEQ ID NO: 17112 - RNA, 22 nt, Artificial Sequence
  SAMD9 targeting guide sequence portion
aaaucucauuagaauuuuuuca

SEQ ID NO: 17113 - RNA, 22 nt, Artificial Sequence
  SAMD9 targeting guide sequence portion
aaaucuuccuccagugaaaaaa

SEQ ID NO: 17114 - RNA, 22 nt, Artificial Sequence
  SAMD9 targeting guide sequence portion
aaaugacaugaucuagaaucag

SEQ ID NO: 17115 - RNA, 22 nt, Artificial Sequence
  SAMD9 targeting guide sequence portion
aaaugugauuuguuucugucuu

SEQ ID NO: 17116 - RNA, 22 nt, Artificial Sequence
  SAMD9 targeting guide sequence portion
aaauuacugauucuagaucaug

SEQ ID NO: 17117 - RNA, 22 nt, Artificial Sequence
  SAMD9 targeting guide sequence portion
aaauucuaaugagauuuugaag

SEQ ID NO: 17118 - RNA, 22 nt, Artificial Sequence
  SAMD9 targeting guide sequence portion
aaauuucaaaagcauaaucagu

SEQ ID NO: 17119 - RNA, 22 nt, Artificial Sequence
  SAMD9 targeting guide sequence portion
aaauuugaacacagacuagaua

SEQ ID NO: 17120 - RNA, 22 nt, Artificial Sequence
  SAMD9 targeting guide sequence portion
aaauuuuaacuccauaacuuau

SEQ ID NO: 17121 - RNA, 22 nt, Artificial Sequence
  SAMD9 targeting guide sequence portion
aaauuuuaugcagaagcaaggg

SEQ ID NO: 17122 - RNA, 22 nt, Artificial Sequence
  SAMD9 targeting guide sequence portion
aaauuuuucugauugccuaaua

SEQ ID NO: 17123 - RNA, 22 nt, Artificial Sequence
  SAMD9 targeting guide sequence portion
aacaagauuaguccugaguuaa

SEQ ID NO: 17124 - RNA, 22 nt, Artificial Sequence
  SAMD9 targeting guide sequence portion
aacaauaaagagugagcuuaua

SEQ ID NO: 17125 - RNA, 22 nt, Artificial Sequence
  SAMD9 targeting guide sequence portion
aacaauggcugcaagcuggaua

SEQ ID NO: 17126 - RNA, 22 nt, Artificial Sequence
  SAMD9 targeting guide sequence portion
aacacaaaauuacugauucuag

SEQ ID NO: 17127 - RNA, 22 nt, Artificial Sequence
  SAMD9 targeting guide sequence portion
aacacagacuagauauuugagg

SEQ ID NO: 17128 - RNA, 22 nt, Artificial Sequence
  SAMD9 targeting guide sequence portion
aacauaaccauggaaucuucaa

SEQ ID NO: 17129 - RNA, 22 nt, Artificial Sequence
  SAMD9 targeting guide sequence portion
aaccauggaaucuucaauaaua

SEQ ID NO: 17130 - RNA, 22 nt, Artificial Sequence
  SAMD9 targeting guide sequence portion
aaccgaaacaagauuaguccug

SEQ ID NO: 17131 - RNA, 22 nt, Artificial Sequence
  SAMD9 targeting guide sequence portion
aacucaggacuaaucuuguuuc

SEQ ID NO: 17132 - RNA, 22 nt, Artificial Sequence
  SAMD9 targeting guide sequence portion
aacuccauaacuuauaagcuca

SEQ ID NO: 17133 - RNA, 22 nt, Artificial Sequence
  SAMD9 targeting guide sequence portion
aacucuuuaaaaaacauaacca

SEQ ID NO: 17134 - RNA, 22 nt, Artificial Sequence
  SAMD9 targeting guide sequence portion
aacuuauaagcucacucuuuau

SEQ ID NO: 17135 - RNA, 22 nt, Artificial Sequence
  SAMD9 targeting guide sequence portion
aagagaaaauuucaaaagcaua

SEQ ID NO: 17136 - RNA, 22 nt, Artificial Sequence
  SAMD9 targeting guide sequence portion
aagagggagaaaagugugcuga

SEQ ID NO: 17137 - RNA, 22 nt, Artificial Sequence
  SAMD9 targeting guide sequence portion
aagagugagcuuauaaguuaug

SEQ ID NO: 17138 - RNA, 22 nt, Artificial Sequence
  SAMD9 targeting guide sequence portion
aagaguucaugccuuuuagaga

SEQ ID NO: 17139 - RNA, 22 nt, Artificial Sequence
  SAMD9 targeting guide sequence portion
aagauuaguccugaguuaacaa

SEQ ID NO: 17140 - RNA, 22 nt, Artificial Sequence
  SAMD9 targeting guide sequence portion
aagauuccaugguuauguuuuu

SEQ ID NO: 17141 - RNA, 22 nt, Artificial Sequence
  SAMD9 targeting guide sequence portion
aagauuuucccuugcuucugca

SEQ ID NO: 17142 - RNA, 22 nt, Artificial Sequence
  SAMD9 targeting guide sequence portion
aagcaagggaaaaucuuccucc

SEQ ID NO: 17143 - RNA, 22 nt, Artificial Sequence
  SAMD9 targeting guide sequence portion
aagcauaaucaguaagagggag

SEQ ID NO: 17144 - RNA, 22 nt, Artificial Sequence
  SAMD9 targeting guide sequence portion
aagcucacucuuuauuguuacu

SEQ ID NO: 17145 - RNA, 22 nt, Artificial Sequence
  SAMD9 targeting guide sequence portion
aagcuggauacauggaauucag

SEQ ID NO: 17146 - RNA, 22 nt, Artificial Sequence
  SAMD9 targeting guide sequence portion
aaggcaugaacucuuuaaaaaa

SEQ ID NO: 17147 - RNA, 22 nt, Artificial Sequence
  SAMD9 targeting guide sequence portion
aagggaaaaucuuccuccagug

SEQ ID NO: 17148 - RNA, 22 nt, Artificial Sequence
  SAMD9 targeting guide sequence portion
aagggaaguagaaccgaaacaa

SEQ ID NO: 17149 - RNA, 22 nt, Artificial Sequence
  SAMD9 targeting guide sequence portion
aagguacuauauuauugaagau

SEQ ID NO: 17150 - RNA, 22 nt, Artificial Sequence
  SAMD9 targeting guide sequence portion
aaguaacaauaaagagugagcu

SEQ ID NO: 17151 - RNA, 22 nt, Artificial Sequence
  SAMD9 targeting guide sequence portion
aaguagaaccgaaacaagauua

SEQ ID NO: 17152 - RNA, 22 nt, Artificial Sequence
  SAMD9 targeting guide sequence portion
aaguauuuguaaauaaaugaca

SEQ ID NO: 17153 - RNA, 22 nt, Artificial Sequence
  SAMD9 targeting guide sequence portion
aagugugcugaauuccauguau

SEQ ID NO: 17154 - RNA, 22 nt, Artificial Sequence
  SAMD9 targeting guide sequence portion
aaguuauggaguuaaaauuuua

SEQ ID NO: 17155 - RNA, 22 nt, Artificial Sequence
  SAMD9 targeting guide sequence portion
aauaaagagugagcuuauaagu

SEQ ID NO: 17156 - RNA, 22 nt, Artificial Sequence
  SAMD9 targeting guide sequence portion
aauaaaugacaugaucuagaau

SEQ ID NO: 17157 - RNA, 22 nt, Artificial Sequence
  SAMD9 targeting guide sequence portion
aauaauauaguaccuuaauauc

SEQ ID NO: 17158 - RNA, 22 nt, Artificial Sequence
  SAMD9 targeting guide sequence portion
aauacuuuaguauguaucucua

SEQ ID NO: 17159 - RNA, 22 nt, Artificial Sequence
  SAMD9 targeting guide sequence portion
aauauaguaccuuaauauccuc

SEQ ID NO: 17160 - RNA, 22 nt, Artificial Sequence
  SAMD9 targeting guide sequence portion
aauauccucaaauaucuagucu

SEQ ID NO: 17161 - RNA, 22 nt, Artificial Sequence
  SAMD9 targeting guide sequence portion
aauaucuagucuguguucaaau

SEQ ID NO: 17162 - RNA, 22 nt, Artificial Sequence
  SAMD9 targeting guide sequence portion
aaucaauuauuaggcaaucaga

SEQ ID NO: 17163 - RNA, 22 nt, Artificial Sequence
  SAMD9 targeting guide sequence portion
aaucagaaaaauuugaacacag

SEQ ID NO: 17164 - RNA, 22 nt, Artificial Sequence
  SAMD9 targeting guide sequence portion
aaucaguaagagggagaaaagu

SEQ ID NO: 17165 - RNA, 22 nt, Artificial Sequence
  SAMD9 targeting guide sequence portion
aaucaguaauuuuguguuuggg

SEQ ID NO: 17166 - RNA, 22 nt, Artificial Sequence
  SAMD9 targeting guide sequence portion
aaucuaaaaucaauuauuaggc

SEQ ID NO: 17167 - RNA, 22 nt, Artificial Sequence
  SAMD9 targeting guide sequence portion
aaucucauuagaauuuuuucac

SEQ ID NO: 17168 - RNA, 22 nt, Artificial Sequence
  SAMD9 targeting guide sequence portion
aaucuuccuccagugaaaaaau

SEQ ID NO: 17169 - RNA, 22 nt, Artificial Sequence
  SAMD9 targeting guide sequence portion
aaucuuguuucgguucuacuuc

SEQ ID NO: 17170 - RNA, 22 nt, Artificial Sequence
  SAMD9 targeting guide sequence portion
aaugacaugaucuagaaucagu

SEQ ID NO: 17171 - RNA, 22 nt, Artificial Sequence
  SAMD9 targeting guide sequence portion
aaugagauuuugaagacagaaa

SEQ ID NO: 17172 - RNA, 22 nt, Artificial Sequence
  SAMD9 targeting guide sequence portion
aauggcugcaagcuggauacau

SEQ ID NO: 17173 - RNA, 22 nt, Artificial Sequence
  SAMD9 targeting guide sequence portion
aaugugauuuguuucugucuuc

SEQ ID NO: 17174 - RNA, 22 nt, Artificial Sequence
  SAMD9 targeting guide sequence portion
aauguuuuacaagagaaaauuu

SEQ ID NO: 17175 - RNA, 22 nt, Artificial Sequence
  SAMD9 targeting guide sequence portion
aauuacugauucuagaucaugu

SEQ ID NO: 17176 - RNA, 22 nt, Artificial Sequence
  SAMD9 targeting guide sequence portion
aauuagaaaguaacaauaaaga

SEQ ID NO: 17177 - RNA, 22 nt, Artificial Sequence
  SAMD9 targeting guide sequence portion
aauuauuaggcaaucagaaaaa

SEQ ID NO: 17178 - RNA, 22 nt, Artificial Sequence
  SAMD9 targeting guide sequence portion
aauucagcacacuuuucucccu

SEQ ID NO: 17179 - RNA, 22 nt, Artificial Sequence
  SAMD9 targeting guide sequence portion
aauuccauguauccagcuugca

SEQ ID NO: 17180 - RNA, 22 nt, Artificial Sequence
  SAMD9 targeting guide sequence portion
aauucuaaugagauuuugaaga

SEQ ID NO: 17181 - RNA, 22 nt, Artificial Sequence
  SAMD9 targeting guide sequence portion
aauuucaaaagcauaaucagua

SEQ ID NO: 17182 - RNA, 22 nt, Artificial Sequence
  SAMD9 targeting guide sequence portion
aauuugaacacagacuagauau

SEQ ID NO: 17183 - RNA, 22 nt, Artificial Sequence
  SAMD9 targeting guide sequence portion
aauuuuaacuccauaacuuaua

SEQ ID NO: 17184 - RNA, 22 nt, Artificial Sequence
  SAMD9 targeting guide sequence portion
aauuuuaugcagaagcaaggga

SEQ ID NO: 17185 - RNA, 22 nt, Artificial Sequence
  SAMD9 targeting guide sequence portion
aauuuuguguuugggguguggg

SEQ ID NO: 17186 - RNA, 22 nt, Artificial Sequence
  SAMD9 targeting guide sequence portion
aauuuuucugauugccuaauaa

SEQ ID NO: 17187 - RNA, 22 nt, Artificial Sequence
  SAMD9 targeting guide sequence portion
aauuuuuucacuggaggaagau

SEQ ID NO: 17188 - RNA, 22 nt, Artificial Sequence
  SAMD9 targeting guide sequence portion
acaaaauuacugauucuagauc

SEQ ID NO: 17189 - RNA, 22 nt, Artificial Sequence
  SAMD9 targeting guide sequence portion
acaaauacuuuaguauguaucu

SEQ ID NO: 17190 - RNA, 22 nt, Artificial Sequence
  SAMD9 targeting guide sequence portion
acaagagaaaauuucaaaagca

SEQ ID NO: 17191 - RNA, 22 nt, Artificial Sequence
  SAMD9 targeting guide sequence portion
acaagauuaguccugaguuaac

SEQ ID NO: 17192 - RNA, 22 nt, Artificial Sequence
  SAMD9 targeting guide sequence portion
acaauaaagagugagcuuauaa

SEQ ID NO: 17193 - RNA, 22 nt, Artificial Sequence
  SAMD9 targeting guide sequence portion
acaauggcugcaagcuggauac

SEQ ID NO: 17194 - RNA, 22 nt, Artificial Sequence
  SAMD9 targeting guide sequence portion
acacaaaauuacugauucuaga

SEQ ID NO: 17195 - RNA, 22 nt, Artificial Sequence
  SAMD9 targeting guide sequence portion
acacagacuagauauuugagga

SEQ ID NO: 17196 - RNA, 22 nt, Artificial Sequence
  SAMD9 targeting guide sequence portion
acaccccaaacacaaaauuacu

SEQ ID NO: 17197 - RNA, 22 nt, Artificial Sequence
  SAMD9 targeting guide sequence portion
acacuuuucucccucuuacuga

SEQ ID NO: 17198 - RNA, 22 nt, Artificial Sequence
  SAMD9 targeting guide sequence portion
acagacuagauauuugaggaua

SEQ ID NO: 17199 - RNA, 22 nt, Artificial Sequence
  SAMD9 targeting guide sequence portion
acauaaccauggaaucuucaau

SEQ ID NO: 17200 - RNA, 22 nt, Artificial Sequence
  SAMD9 targeting guide sequence portion
acaugaucuagaaucaguaauu

SEQ ID NO: 17201 - RNA, 22 nt, Artificial Sequence
  SAMD9 targeting guide sequence portion
acauggaauucagcacacuuuu

SEQ ID NO: 17202 - RNA, 22 nt, Artificial Sequence
  SAMD9 targeting guide sequence portion
accacccccacaccccaaacac

SEQ ID NO: 17203 - RNA, 22 nt, Artificial Sequence
  SAMD9 targeting guide sequence portion
accauggaaucuucaauaauau

SEQ ID NO: 17204 - RNA, 22 nt, Artificial Sequence
  SAMD9 targeting guide sequence portion
accccaaacacaaaauuacuga

SEQ ID NO: 17205 - RNA, 22 nt, Artificial Sequence
  SAMD9 targeting guide sequence portion
acccccacaccccaaacacaaa

SEQ ID NO: 17206 - RNA, 22 nt, Artificial Sequence
  SAMD9 targeting guide sequence portion
accgaaacaagauuaguccuga

SEQ ID NO: 17207 - RNA, 22 nt, Artificial Sequence
  SAMD9 targeting guide sequence portion
accuuaauauccucaaauaucu

SEQ ID NO: 17208 - RNA, 22 nt, Artificial Sequence
  SAMD9 targeting guide sequence portion
acuaaaguauuuguaaauaaau

SEQ ID NO: 17209 - RNA, 22 nt, Artificial Sequence
  SAMD9 targeting guide sequence portion
acuaaucuuguuucgguucuac

SEQ ID NO: 17210 - RNA, 22 nt, Artificial Sequence
  SAMD9 targeting guide sequence portion
acuagauauuugaggauauuaa

SEQ ID NO: 17211 - RNA, 22 nt, Artificial Sequence
  SAMD9 targeting guide sequence portion
acuauauuauugaagauuccau

SEQ ID NO: 17212 - RNA, 22 nt, Artificial Sequence
  SAMD9 targeting guide sequence portion
acucaggacuaaucuuguuucg

SEQ ID NO: 17213 - RNA, 22 nt, Artificial Sequence
  SAMD9 targeting guide sequence portion
acuccauaacuuauaagcucac

SEQ ID NO: 17214 - RNA, 22 nt, Artificial Sequence
  SAMD9 targeting guide sequence portion
acucuuuaaaaaacauaaccau

SEQ ID NO: 17215 - RNA, 22 nt, Artificial Sequence
  SAMD9 targeting guide sequence portion
acucuuuauuguuacuuucuaa

SEQ ID NO: 17216 - RNA, 22 nt, Artificial Sequence
  SAMD9 targeting guide sequence portion
acugauuaugcuuuugaaauuu

SEQ ID NO: 17217 - RNA, 22 nt, Artificial Sequence
  SAMD9 targeting guide sequence portion
acugauucuagaucaugucauu

SEQ ID NO: 17218 - RNA, 22 nt, Artificial Sequence
  SAMD9 targeting guide sequence portion
acuggaggaagauuuucccuug

SEQ ID NO: 17219 - RNA, 22 nt, Artificial Sequence
  SAMD9 targeting guide sequence portion
acuuauaagcucacucuuuauu

SEQ ID NO: 17220 - RNA, 22 nt, Artificial Sequence
  SAMD9 targeting guide sequence portion
acuucccuuucaccacccccac

SEQ ID NO: 17221 - RNA, 22 nt, Artificial Sequence
  SAMD9 targeting guide sequence portion
acuuuaguauguaucucuaaaa

SEQ ID NO: 17222 - RNA, 22 nt, Artificial Sequence
  SAMD9 targeting guide sequence portion
acuuuucucccucuuacugauu

SEQ ID NO: 17223 - RNA, 22 nt, Artificial Sequence
  SAMD9 targeting guide sequence portion
agaaaaauuugaacacagacua

SEQ ID NO: 17224 - RNA, 22 nt, Artificial Sequence
  SAMD9 targeting guide sequence portion
agaaaagugugcugaauuccau

SEQ ID NO: 17225 - RNA, 22 nt, Artificial Sequence
  SAMD9 targeting guide sequence portion
agaaaauuucaaaagcauaauc

SEQ ID NO: 17226 - RNA, 22 nt, Artificial Sequence
  SAMD9 targeting guide sequence portion
agaaaguaacaauaaagaguga

SEQ ID NO: 17227 - RNA, 22 nt, Artificial Sequence
  SAMD9 targeting guide sequence portion
agaaccgaaacaagauuagucc

SEQ ID NO: 17228 - RNA, 22 nt, Artificial Sequence
  SAMD9 targeting guide sequence portion
agaagcaagggaaaaucuuccu

SEQ ID NO: 17229 - RNA, 22 nt, Artificial Sequence
  SAMD9 targeting guide sequence portion
agaaucaguaauuuuguguuug

SEQ ID NO: 17230 - RNA, 22 nt, Artificial Sequence
  SAMD9 targeting guide sequence portion
agaauuuuuucacuggaggaag

SEQ ID NO: 17231 - RNA, 22 nt, Artificial Sequence
  SAMD9 targeting guide sequence portion
agacuagauauuugaggauauu

SEQ ID NO: 17232 - RNA, 22 nt, Artificial Sequence
  SAMD9 targeting guide sequence portion
agagaaaauuucaaaagcauaa

SEQ ID NO: 17233 - RNA, 22 nt, Artificial Sequence
  SAMD9 targeting guide sequence portion
agagauacauacuaaaguauuu

SEQ ID NO: 17234 - RNA, 22 nt, Artificial Sequence
  SAMD9 targeting guide sequence portion
agagggagaaaagugugcugaa

SEQ ID NO: 17235 - RNA, 22 nt, Artificial Sequence
  SAMD9 targeting guide sequence portion
agagugagcuuauaaguuaugg

SEQ ID NO: 17236 - RNA, 22 nt, Artificial Sequence
  SAMD9 targeting guide sequence portion
agaguucaugccuuuuagagau

SEQ ID NO: 17237 - RNA, 22 nt, Artificial Sequence
  SAMD9 targeting guide sequence portion
agauauuugaggauauuaaggu

SEQ ID NO: 17238 - RNA, 22 nt, Artificial Sequence
  SAMD9 targeting guide sequence portion
agaucaugucauuuauuuacaa

SEQ ID NO: 17239 - RNA, 22 nt, Artificial Sequence
  SAMD9 targeting guide sequence portion
agauuaguccugaguuaacaau

SEQ ID NO: 17240 - RNA, 22 nt, Artificial Sequence
  SAMD9 targeting guide sequence portion
agauuccaugguuauguuuuuu

SEQ ID NO: 17241 - RNA, 22 nt, Artificial Sequence
  SAMD9 targeting guide sequence portion
agauuuucccuugcuucugcau

SEQ ID NO: 17242 - RNA, 22 nt, Artificial Sequence
  SAMD9 targeting guide sequence portion
agauuuugaagacagaaacaaa

SEQ ID NO: 17243 - RNA, 22 nt, Artificial Sequence
  SAMD9 targeting guide sequence portion
agcaagggaaaaucuuccucca

SEQ ID NO: 17244 - RNA, 22 nt, Artificial Sequence
  SAMD9 targeting guide sequence portion
agcacacuuuucucccucuuac

SEQ ID NO: 17245 - RNA, 22 nt, Artificial Sequence
  SAMD9 targeting guide sequence portion
agcauaaucaguaagagggaga

SEQ ID NO: 17246 - RNA, 22 nt, Artificial Sequence
  SAMD9 targeting guide sequence portion
agccauuguuaacucaggacua

SEQ ID NO: 17247 - RNA, 22 nt, Artificial Sequence
  SAMD9 targeting guide sequence portion
agcucacucuuuauuguuacuu

SEQ ID NO: 17248 - RNA, 22 nt, Artificial Sequence
  SAMD9 targeting guide sequence portion
agcuggauacauggaauucagc

SEQ ID NO: 17249 - RNA, 22 nt, Artificial Sequence
  SAMD9 targeting guide sequence portion
agcuuauaaguuauggaguuaa

SEQ ID NO: 17250 - RNA, 22 nt, Artificial Sequence
  SAMD9 targeting guide sequence portion
agcuugcagccauuguuaacuc

SEQ ID NO: 17251 - RNA, 22 nt, Artificial Sequence
  SAMD9 targeting guide sequence portion
aggaagauuuucccuugcuucu

SEQ ID NO: 17252 - RNA, 22 nt, Artificial Sequence
  SAMD9 targeting guide sequence portion
aggacuaaucuuguuucgguuc

SEQ ID NO: 17253 - RNA, 22 nt, Artificial Sequence
  SAMD9 targeting guide sequence portion
aggauauuaagguacuauauua

SEQ ID NO: 17254 - RNA, 22 nt, Artificial Sequence
  SAMD9 targeting guide sequence portion
aggcaaucagaaaaauuugaac

SEQ ID NO: 17255 - RNA, 22 nt, Artificial Sequence
  SAMD9 targeting guide sequence portion
aggcaugaacucuuuaaaaaac

SEQ ID NO: 17256 - RNA, 22 nt, Artificial Sequence
  SAMD9 targeting guide sequence portion
agggaaaaucuuccuccaguga

SEQ ID NO: 17257 - RNA, 22 nt, Artificial Sequence
  SAMD9 targeting guide sequence portion
agggaaguagaaccgaaacaag

SEQ ID NO: 17258 - RNA, 22 nt, Artificial Sequence
  SAMD9 targeting guide sequence portion
agggagaaaagugugcugaauu

SEQ ID NO: 17259 - RNA, 22 nt, Artificial Sequence
  SAMD9 targeting guide sequence portion
agguacuauauuauugaagauu

SEQ ID NO: 17260 - RNA, 22 nt, Artificial Sequence
  SAMD9 targeting guide sequence portion
aguaacaauaaagagugagcuu

SEQ ID NO: 17261 - RNA, 22 nt, Artificial Sequence
  SAMD9 targeting guide sequence portion
aguaagagggagaaaagugugc

SEQ ID NO: 17262 - RNA, 22 nt, Artificial Sequence
  SAMD9 targeting guide sequence portion
aguaauuuuguguuuggggugu

SEQ ID NO: 17263 - RNA, 22 nt, Artificial Sequence
  SAMD9 targeting guide sequence portion
aguaccuuaauauccucaaaua

SEQ ID NO: 17264 - RNA, 22 nt, Artificial Sequence
  SAMD9 targeting guide sequence portion
aguagaaccgaaacaagauuag

SEQ ID NO: 17265 - RNA, 22 nt, Artificial Sequence
  SAMD9 targeting guide sequence portion
aguauguaucucuaaaaggcau

SEQ ID NO: 17266 - RNA, 22 nt, Artificial Sequence
  SAMD9 targeting guide sequence portion
aguauuuguaaauaaaugacau

SEQ ID NO: 17267 - RNA, 22 nt, Artificial Sequence
  SAMD9 targeting guide sequence portion
aguccugaguuaacaauggcug

SEQ ID NO: 17268 - RNA, 22 nt, Artificial Sequence
  SAMD9 targeting guide sequence portion
agucuguguucaaauuuuucug

SEQ ID NO: 17269 - RNA, 22 nt, Artificial Sequence
  SAMD9 targeting guide sequence portion
agugaaaaaauucuaaugagau

SEQ ID NO: 17270 - RNA, 22 nt, Artificial Sequence
  SAMD9 targeting guide sequence portion
agugagcuuauaaguuauggag

SEQ ID NO: 17271 - RNA, 22 nt, Artificial Sequence
  SAMD9 targeting guide sequence portion
agugugcugaauuccauguauc

SEQ ID NO: 17272 - RNA, 22 nt, Artificial Sequence
  SAMD9 targeting guide sequence portion
aguuaaaauuuuaugcagaagc

SEQ ID NO: 17273 - RNA, 22 nt, Artificial Sequence
  SAMD9 targeting guide sequence portion
aguuaacaauggcugcaagcug

SEQ ID NO: 17274 - RNA, 22 nt, Artificial Sequence
  SAMD9 targeting guide sequence portion
aguuauggaguuaaaauuuuau

SEQ ID NO: 17275 - RNA, 22 nt, Artificial Sequence
  SAMD9 targeting guide sequence portion
aguucaugccuuuuagagauac

SEQ ID NO: 17276 - RNA, 22 nt, Artificial Sequence
  SAMD9 targeting guide sequence portion
auaaagagugagcuuauaaguu

SEQ ID NO: 17277 - RNA, 22 nt, Artificial Sequence
  SAMD9 targeting guide sequence portion
auaaaugacaugaucuagaauc

SEQ ID NO: 17278 - RNA, 22 nt, Artificial Sequence
  SAMD9 targeting guide sequence portion
auaaccauggaaucuucaauaa

SEQ ID NO: 17279 - RNA, 22 nt, Artificial Sequence
  SAMD9 targeting guide sequence portion
auaacuuauaagcucacucuuu

SEQ ID NO: 17280 - RNA, 22 nt, Artificial Sequence
  SAMD9 targeting guide sequence portion
auaagcucacucuuuauuguua

SEQ ID NO: 17281 - RNA, 22 nt, Artificial Sequence
  SAMD9 targeting guide sequence portion
auaaguuauggaguuaaaauuu

SEQ ID NO: 17282 - RNA, 22 nt, Artificial Sequence
  SAMD9 targeting guide sequence portion
auaauauaguaccuuaauaucc

SEQ ID NO: 17283 - RNA, 22 nt, Artificial Sequence
  SAMD9 targeting guide sequence portion
auaaucaguaagagggagaaaa

SEQ ID NO: 17284 - RNA, 22 nt, Artificial Sequence
  SAMD9 targeting guide sequence portion
auacauggaauucagcacacuu

SEQ ID NO: 17285 - RNA, 22 nt, Artificial Sequence
  SAMD9 targeting guide sequence portion
auacuuuaguauguaucucuaa

SEQ ID NO: 17286 - RNA, 22 nt, Artificial Sequence
  SAMD9 targeting guide sequence portion
auaguaccuuaauauccucaaa

SEQ ID NO: 17287 - RNA, 22 nt, Artificial Sequence
  SAMD9 targeting guide sequence portion
auauaguaccuuaauauccuca

SEQ ID NO: 17288 - RNA, 22 nt, Artificial Sequence
  SAMD9 targeting guide sequence portion
auauccucaaauaucuagucug

SEQ ID NO: 17289 - RNA, 22 nt, Artificial Sequence
  SAMD9 targeting guide sequence portion
auaucuagucuguguucaaauu

SEQ ID NO: 17290 - RNA, 22 nt, Artificial Sequence
  SAMD9 targeting guide sequence portion
auauuauugaagauuccauggu

SEQ ID NO: 17291 - RNA, 22 nt, Artificial Sequence
  SAMD9 targeting guide sequence portion
auauuugaggauauuaagguac

SEQ ID NO: 17292 - RNA, 22 nt, Artificial Sequence
  SAMD9 targeting guide sequence portion
aucaauuauuaggcaaucagaa

SEQ ID NO: 17293 - RNA, 22 nt, Artificial Sequence
  SAMD9 targeting guide sequence portion
aucagaaaaauuugaacacaga

SEQ ID NO: 17294 - RNA, 22 nt, Artificial Sequence
  SAMD9 targeting guide sequence portion
aucaguaagagggagaaaagug

SEQ ID NO: 17295 - RNA, 22 nt, Artificial Sequence
  SAMD9 targeting guide sequence portion
aucaguaauuuuguguuugggg

SEQ ID NO: 17296 - RNA, 22 nt, Artificial Sequence
  SAMD9 targeting guide sequence portion
auccagcuugcagccauuguua

SEQ ID NO: 17297 - RNA, 22 nt, Artificial Sequence
  SAMD9 targeting guide sequence portion
auccucaaauaucuagucugug

SEQ ID NO: 17298 - RNA, 22 nt, Artificial Sequence
  SAMD9 targeting guide sequence portion
aucuaaaaucaauuauuaggca

SEQ ID NO: 17299 - RNA, 22 nt, Artificial Sequence
  SAMD9 targeting guide sequence portion
aucuagaaucaguaauuuugug

SEQ ID NO: 17300 - RNA, 22 nt, Artificial Sequence
  SAMD9 targeting guide sequence portion
aucuagucuguguucaaauuuu

SEQ ID NO: 17301 - RNA, 22 nt, Artificial Sequence
  SAMD9 targeting guide sequence portion
aucucauuagaauuuuuucacu

SEQ ID NO: 17302 - RNA, 22 nt, Artificial Sequence
  SAMD9 targeting guide sequence portion
aucucuaaaaggcaugaacucu

SEQ ID NO: 17303 - RNA, 22 nt, Artificial Sequence
  SAMD9 targeting guide sequence portion
aucuucaauaauauaguaccuu

SEQ ID NO: 17304 - RNA, 22 nt, Artificial Sequence
  SAMD9 targeting guide sequence portion
aucuuccuccagugaaaaaauu

SEQ ID NO: 17305 - RNA, 22 nt, Artificial Sequence
  SAMD9 targeting guide sequence portion
aucuuguuucgguucuacuucc

SEQ ID NO: 17306 - RNA, 22 nt, Artificial Sequence
  SAMD9 targeting guide sequence portion
augaacucuuuaaaaaacauaa

SEQ ID NO: 17307 - RNA, 22 nt, Artificial Sequence
  SAMD9 targeting guide sequence portion
augacaugaucuagaaucagua

SEQ ID NO: 17308 - RNA, 22 nt, Artificial Sequence
  SAMD9 targeting guide sequence portion
augagauuuugaagacagaaac

SEQ ID NO: 17309 - RNA, 22 nt, Artificial Sequence
  SAMD9 targeting guide sequence portion
augaucuagaaucaguaauuuu

SEQ ID NO: 17310 - RNA, 22 nt, Artificial Sequence
  SAMD9 targeting guide sequence portion
augcagaagcaagggaaaaucu

SEQ ID NO: 17311 - RNA, 22 nt, Artificial Sequence
  SAMD9 targeting guide sequence portion
augccuuuuagagauacauacu

SEQ ID NO: 17312 - RNA, 22 nt, Artificial Sequence
  SAMD9 targeting guide sequence portion
augcuuuugaaauuuucucuug

SEQ ID NO: 17313 - RNA, 22 nt, Artificial Sequence
  SAMD9 targeting guide sequence portion
auggaaucuucaauaauauagu

SEQ ID NO: 17314 - RNA, 22 nt, Artificial Sequence
  SAMD9 targeting guide sequence portion
auggaauucagcacacuuuucu

SEQ ID NO: 17315 - RNA, 22 nt, Artificial Sequence
  SAMD9 targeting guide sequence portion
auggaguuaaaauuuuaugcag

SEQ ID NO: 17316 - RNA, 22 nt, Artificial Sequence
  SAMD9 targeting guide sequence portion
auggcugcaagcuggauacaug

SEQ ID NO: 17317 - RNA, 22 nt, Artificial Sequence
  SAMD9 targeting guide sequence portion
augguuauguuuuuuaaagagu

SEQ ID NO: 17318 - RNA, 22 nt, Artificial Sequence
  SAMD9 targeting guide sequence portion
auguauccagcuugcagccauu

SEQ ID NO: 17319 - RNA, 22 nt, Artificial Sequence
  SAMD9 targeting guide sequence portion
auguaucucuaaaaggcaugaa

SEQ ID NO: 17320 - RNA, 22 nt, Artificial Sequence
  SAMD9 targeting guide sequence portion
augugauuuguuucugucuuca

SEQ ID NO: 17321 - RNA, 22 nt, Artificial Sequence
  SAMD9 targeting guide sequence portion
auguuuuacaagagaaaauuuc

SEQ ID NO: 17322 - RNA, 22 nt, Artificial Sequence
  SAMD9 targeting guide sequence portion
auguuuuuuaaagaguucaugc

SEQ ID NO: 17323 - RNA, 22 nt, Artificial Sequence
  SAMD9 targeting guide sequence portion
auuaagguacuauauuauugaa

SEQ ID NO: 17324 - RNA, 22 nt, Artificial Sequence
  SAMD9 targeting guide sequence portion
auuacugauucuagaucauguc

SEQ ID NO: 17325 - RNA, 22 nt, Artificial Sequence
  SAMD9 targeting guide sequence portion
auuagaaaguaacaauaaagag

SEQ ID NO: 17326 - RNA, 22 nt, Artificial Sequence
  SAMD9 targeting guide sequence portion
auuagaauuuuuucacuggagg

SEQ ID NO: 17327 - RNA, 22 nt, Artificial Sequence
  SAMD9 targeting guide sequence portion
auuaggcaaucagaaaaauuug

SEQ ID NO: 17328 - RNA, 22 nt, Artificial Sequence
  SAMD9 targeting guide sequence portion
auuaguccugaguuaacaaugg

SEQ ID NO: 17329 - RNA, 22 nt, Artificial Sequence
  SAMD9 targeting guide sequence portion
auuaugcuuuugaaauuuucuc

SEQ ID NO: 17330 - RNA, 22 nt, Artificial Sequence
  SAMD9 targeting guide sequence portion
auuauuaggcaaucagaaaaau

SEQ ID NO: 17331 - RNA, 22 nt, Artificial Sequence
  SAMD9 targeting guide sequence portion
auuauugaagauuccaugguua

SEQ ID NO: 17332 - RNA, 22 nt, Artificial Sequence
  SAMD9 targeting guide sequence portion
auucagcacacuuuucucccuc

SEQ ID NO: 17333 - RNA, 22 nt, Artificial Sequence
  SAMD9 targeting guide sequence portion
auuccaugguuauguuuuuuaa

SEQ ID NO: 17334 - RNA, 22 nt, Artificial Sequence
  SAMD9 targeting guide sequence portion
auuccauguauccagcuugcag

SEQ ID NO: 17335 - RNA, 22 nt, Artificial Sequence
  SAMD9 targeting guide sequence portion
auucuaaugagauuuugaagac

SEQ ID NO: 17336 - RNA, 22 nt, Artificial Sequence
  SAMD9 targeting guide sequence portion
auucuagaucaugucauuuauu

SEQ ID NO: 17337 - RNA, 22 nt, Artificial Sequence
  SAMD9 targeting guide sequence portion
auugaagauuccaugguuaugu

SEQ ID NO: 17338 - RNA, 22 nt, Artificial Sequence
  SAMD9 targeting guide sequence portion
auugccuaauaauugauuuuag

SEQ ID NO: 17339 - RNA, 22 nt, Artificial Sequence
  SAMD9 targeting guide sequence portion
auuguuaacucaggacuaaucu

SEQ ID NO: 17340 - RNA, 22 nt, Artificial Sequence
  SAMD9 targeting guide sequence portion
auuuacaaauacuuuaguaugu

SEQ ID NO: 17341 - RNA, 22 nt, Artificial Sequence
  SAMD9 targeting guide sequence portion
auuucaaaagcauaaucaguaa

SEQ ID NO: 17342 - RNA, 22 nt, Artificial Sequence
  SAMD9 targeting guide sequence portion
auuugaacacagacuagauauu

SEQ ID NO: 17343 - RNA, 22 nt, Artificial Sequence
  SAMD9 targeting guide sequence portion
auuugaggauauuaagguacua

SEQ ID NO: 17344 - RNA, 22 nt, Artificial Sequence
  SAMD9 targeting guide sequence portion
auuuguaaauaaaugacaugau

SEQ ID NO: 17345 - RNA, 22 nt, Artificial Sequence
  SAMD9 targeting guide sequence portion
auuugucaauuagaaaguaaca

SEQ ID NO: 17346 - RNA, 22 nt, Artificial Sequence
  SAMD9 targeting guide sequence portion
auuuguuucugucuucaaaauc

SEQ ID NO: 17347 - RNA, 22 nt, Artificial Sequence
  SAMD9 targeting guide sequence portion
auuuuaacuccauaacuuauaa

SEQ ID NO: 17348 - RNA, 22 nt, Artificial Sequence
  SAMD9 targeting guide sequence portion
auuuuaugcagaagcaagggaa

SEQ ID NO: 17349 - RNA, 22 nt, Artificial Sequence
  SAMD9 targeting guide sequence portion
auuuucccuugcuucugcauaa

SEQ ID NO: 17350 - RNA, 22 nt, Artificial Sequence
  SAMD9 targeting guide sequence portion
auuuucucuuguaaaacauuua

SEQ ID NO: 17351 - RNA, 22 nt, Artificial Sequence
  SAMD9 targeting guide sequence portion
auuuugaagacagaaacaaauc

SEQ ID NO: 17352 - RNA, 22 nt, Artificial Sequence
  SAMD9 targeting guide sequence portion
auuuuguguuuggggugugggg

SEQ ID NO: 17353 - RNA, 22 nt, Artificial Sequence
  SAMD9 targeting guide sequence portion
auuuuucugauugccuaauaau

SEQ ID NO: 17354 - RNA, 22 nt, Artificial Sequence
  SAMD9 targeting guide sequence portion
auuuuuucacuggaggaagauu

SEQ ID NO: 17355 - RNA, 22 nt, Artificial Sequence
  SAMD9 targeting guide sequence portion
caaaagcauaaucaguaagagg

SEQ ID NO: 17356 - RNA, 22 nt, Artificial Sequence
  SAMD9 targeting guide sequence portion
caaaaucuaaaaucaauuauua

SEQ ID NO: 17357 - RNA, 22 nt, Artificial Sequence
  SAMD9 targeting guide sequence portion
caaaaucucauuagaauuuuuu

SEQ ID NO: 17358 - RNA, 22 nt, Artificial Sequence
  SAMD9 targeting guide sequence portion
caaaauuacugauucuagauca

SEQ ID NO: 17359 - RNA, 22 nt, Artificial Sequence
  SAMD9 targeting guide sequence portion
caaacacaaaauuacugauucu

SEQ ID NO: 17360 - RNA, 22 nt, Artificial Sequence
  SAMD9 targeting guide sequence portion
caaauacuuuaguauguaucuc

SEQ ID NO: 17361 - RNA, 22 nt, Artificial Sequence
  SAMD9 targeting guide sequence portion
caaauaucuagucuguguucaa

SEQ ID NO: 17362 - RNA, 22 nt, Artificial Sequence
  SAMD9 targeting guide sequence portion
caaauuuuucugauugccuaau

SEQ ID NO: 17363 - RNA, 22 nt, Artificial Sequence
  SAMD9 targeting guide sequence portion
caagagaaaauuucaaaagcau

SEQ ID NO: 17364 - RNA, 22 nt, Artificial Sequence
  SAMD9 targeting guide sequence portion
caagauuaguccugaguuaaca

SEQ ID NO: 17365 - RNA, 22 nt, Artificial Sequence
  SAMD9 targeting guide sequence portion
caagcuggauacauggaauuca

SEQ ID NO: 17366 - RNA, 22 nt, Artificial Sequence
  SAMD9 targeting guide sequence portion
caagggaaaaucuuccuccagu

SEQ ID NO: 17367 - RNA, 22 nt, Artificial Sequence
  SAMD9 targeting guide sequence portion
caauaaagagugagcuuauaag

SEQ ID NO: 17368 - RNA, 22 nt, Artificial Sequence
  SAMD9 targeting guide sequence portion
caauaauauaguaccuuaauau

SEQ ID NO: 17369 - RNA, 22 nt, Artificial Sequence
  SAMD9 targeting guide sequence portion
caaucagaaaaauuugaacaca

SEQ ID NO: 17370 - RNA, 22 nt, Artificial Sequence
  SAMD9 targeting guide sequence portion
caauggcugcaagcuggauaca

SEQ ID NO: 17371 - RNA, 22 nt, Artificial Sequence
  SAMD9 targeting guide sequence portion
caauuagaaaguaacaauaaag

SEQ ID NO: 17372 - RNA, 22 nt, Artificial Sequence
  SAMD9 targeting guide sequence portion
caauuauuaggcaaucagaaaa

SEQ ID NO: 17373 - RNA, 22 nt, Artificial Sequence
  SAMD9 targeting guide sequence portion
cacaaaauuacugauucuagau

SEQ ID NO: 17374 - RNA, 22 nt, Artificial Sequence
  SAMD9 targeting guide sequence portion
cacaccccaaacacaaaauuac

SEQ ID NO: 17375 - RNA, 22 nt, Artificial Sequence
  SAMD9 targeting guide sequence portion
cacacuuuucucccucuuacug

SEQ ID NO: 17376 - RNA, 22 nt, Artificial Sequence
  SAMD9 targeting guide sequence portion
cacagacuagauauuugaggau

SEQ ID NO: 17377 - RNA, 22 nt, Artificial Sequence
  SAMD9 targeting guide sequence portion
caccacccccacaccccaaaca

SEQ ID NO: 17378 - RNA, 22 nt, Artificial Sequence
  SAMD9 targeting guide sequence portion
caccccaaacacaaaauuacug

SEQ ID NO: 17379 - RNA, 22 nt, Artificial Sequence
  SAMD9 targeting guide sequence portion
cacccccacaccccaaacacaa

SEQ ID NO: 17380 - RNA, 22 nt, Artificial Sequence
  SAMD9 targeting guide sequence portion
cacucuuuauuguuacuuucua

SEQ ID NO: 17381 - RNA, 22 nt, Artificial Sequence
  SAMD9 targeting guide sequence portion
cacuggaggaagauuuucccuu

SEQ ID NO: 17382 - RNA, 22 nt, Artificial Sequence
  SAMD9 targeting guide sequence portion
cacuuuucucccucuuacugau

SEQ ID NO: 17383 - RNA, 22 nt, Artificial Sequence
  SAMD9 targeting guide sequence portion
cagaaaaauuugaacacagacu

SEQ ID NO: 17384 - RNA, 22 nt, Artificial Sequence
  SAMD9 targeting guide sequence portion
cagaagcaagggaaaaucuucc

SEQ ID NO: 17385 - RNA, 22 nt, Artificial Sequence
  SAMD9 targeting guide sequence portion
cagacuagauauuugaggauau

SEQ ID NO: 17386 - RNA, 22 nt, Artificial Sequence
  SAMD9 targeting guide sequence portion
cagcacacuuuucucccucuua

SEQ ID NO: 17387 - RNA, 22 nt, Artificial Sequence
  SAMD9 targeting guide sequence portion
cagccauuguuaacucaggacu

SEQ ID NO: 17388 - RNA, 22 nt, Artificial Sequence
  SAMD9 targeting guide sequence portion
cagcuugcagccauuguuaacu

SEQ ID NO: 17389 - RNA, 22 nt, Artificial Sequence
  SAMD9 targeting guide sequence portion
caggacuaaucuuguuucgguu

SEQ ID NO: 17390 - RNA, 22 nt, Artificial Sequence
  SAMD9 targeting guide sequence portion
caguaagagggagaaaagugug

SEQ ID NO: 17391 - RNA, 22 nt, Artificial Sequence
  SAMD9 targeting guide sequence portion
caguaauuuuguguuuggggug

SEQ ID NO: 17392 - RNA, 22 nt, Artificial Sequence
  SAMD9 targeting guide sequence portion
cagugaaaaaauucuaaugaga

SEQ ID NO: 17393 - RNA, 22 nt, Artificial Sequence
  SAMD9 targeting guide sequence portion
cauaaccauggaaucuucaaua

SEQ ID NO: 17394 - RNA, 22 nt, Artificial Sequence
  SAMD9 targeting guide sequence portion
cauaacuuauaagcucacucuu

SEQ ID NO: 17395 - RNA, 22 nt, Artificial Sequence
  SAMD9 targeting guide sequence portion
cauaaucaguaagagggagaaa

SEQ ID NO: 17396 - RNA, 22 nt, Artificial Sequence
  SAMD9 targeting guide sequence portion
cauacuaaaguauuuguaaaua

SEQ ID NO: 17397 - RNA, 22 nt, Artificial Sequence
  SAMD9 targeting guide sequence portion
caugaacucuuuaaaaaacaua

SEQ ID NO: 17398 - RNA, 22 nt, Artificial Sequence
  SAMD9 targeting guide sequence portion
caugaucuagaaucaguaauuu

SEQ ID NO: 17399 - RNA, 22 nt, Artificial Sequence
  SAMD9 targeting guide sequence portion
caugccuuuuagagauacauac

SEQ ID NO: 17400 - RNA, 22 nt, Artificial Sequence
  SAMD9 targeting guide sequence portion
cauggaaucuucaauaauauag

SEQ ID NO: 17401 - RNA, 22 nt, Artificial Sequence
  SAMD9 targeting guide sequence portion
cauggaauucagcacacuuuuc

SEQ ID NO: 17402 - RNA, 22 nt, Artificial Sequence
  SAMD9 targeting guide sequence portion
caugguuauguuuuuuaaagag

SEQ ID NO: 17403 - RNA, 22 nt, Artificial Sequence
  SAMD9 targeting guide sequence portion
cauguauccagcuugcagccau

SEQ ID NO: 17404 - RNA, 22 nt, Artificial Sequence
  SAMD9 targeting guide sequence portion
caugucauuuauuuacaaauac

SEQ ID NO: 17405 - RNA, 22 nt, Artificial Sequence
  SAMD9 targeting guide sequence portion
cauuagaauuuuuucacuggag

SEQ ID NO: 17406 - RNA, 22 nt, Artificial Sequence
  SAMD9 targeting guide sequence portion
cauuguuaacucaggacuaauc

SEQ ID NO: 17407 - RNA, 22 nt, Artificial Sequence
  SAMD9 targeting guide sequence portion
ccaaacacaaaauuacugauuc

SEQ ID NO: 17408 - RNA, 22 nt, Artificial Sequence
  SAMD9 targeting guide sequence portion
ccacaccccaaacacaaaauua

SEQ ID NO: 17409 - RNA, 22 nt, Artificial Sequence
  SAMD9 targeting guide sequence portion
ccacccccacaccccaaacaca

SEQ ID NO: 17410 - RNA, 22 nt, Artificial Sequence
  SAMD9 targeting guide sequence portion
ccagcuugcagccauuguuaac

SEQ ID NO: 17411 - RNA, 22 nt, Artificial Sequence
  SAMD9 targeting guide sequence portion
ccagugaaaaaauucuaaugag

SEQ ID NO: 17412 - RNA, 22 nt, Artificial Sequence
  SAMD9 targeting guide sequence portion
ccauaacuuauaagcucacucu

SEQ ID NO: 17413 - RNA, 22 nt, Artificial Sequence
  SAMD9 targeting guide sequence portion
ccauggaaucuucaauaauaua

SEQ ID NO: 17414 - RNA, 22 nt, Artificial Sequence
  SAMD9 targeting guide sequence portion
ccaugguuauguuuuuuaaaga

SEQ ID NO: 17415 - RNA, 22 nt, Artificial Sequence
  SAMD9 targeting guide sequence portion
ccauguauccagcuugcagcca

SEQ ID NO: 17416 - RNA, 22 nt, Artificial Sequence
  SAMD9 targeting guide sequence portion
ccauuguuaacucaggacuaau

SEQ ID NO: 17417 - RNA, 22 nt, Artificial Sequence
  SAMD9 targeting guide sequence portion
cccaaacacaaaauuacugauu

SEQ ID NO: 17418 - RNA, 22 nt, Artificial Sequence
  SAMD9 targeting guide sequence portion
cccacaccccaaacacaaaauu

SEQ ID NO: 17419 - RNA, 22 nt, Artificial Sequence
  SAMD9 targeting guide sequence portion
ccccaaacacaaaauuacugau

SEQ ID NO: 17420 - RNA, 22 nt, Artificial Sequence
  SAMD9 targeting guide sequence portion
ccccacaccccaaacacaaaau

SEQ ID NO: 17421 - RNA, 22 nt, Artificial Sequence
  SAMD9 targeting guide sequence portion
cccccacaccccaaacacaaaa

SEQ ID NO: 17422 - RNA, 22 nt, Artificial Sequence
  SAMD9 targeting guide sequence portion
cccucuuacugauuaugcuuuu

SEQ ID NO: 17423 - RNA, 22 nt, Artificial Sequence
  SAMD9 targeting guide sequence portion
cccuugcuucugcauaaaauuu

SEQ ID NO: 17424 - RNA, 22 nt, Artificial Sequence
  SAMD9 targeting guide sequence portion
cccuuucaccacccccacaccc

SEQ ID NO: 17425 - RNA, 22 nt, Artificial Sequence
  SAMD9 targeting guide sequence portion
ccgaaacaagauuaguccugag

SEQ ID NO: 17426 - RNA, 22 nt, Artificial Sequence
  SAMD9 targeting guide sequence portion
ccucaaauaucuagucuguguu

SEQ ID NO: 17427 - RNA, 22 nt, Artificial Sequence
  SAMD9 targeting guide sequence portion
ccuccagugaaaaaauucuaau

SEQ ID NO: 17428 - RNA, 22 nt, Artificial Sequence
  SAMD9 targeting guide sequence portion
ccucuuacugauuaugcuuuug

SEQ ID NO: 17429 - RNA, 22 nt, Artificial Sequence
  SAMD9 targeting guide sequence portion
ccugaguuaacaauggcugcaa

SEQ ID NO: 17430 - RNA, 22 nt, Artificial Sequence
  SAMD9 targeting guide sequence portion
ccuuaauauccucaaauaucua

SEQ ID NO: 17431 - RNA, 22 nt, Artificial Sequence
  SAMD9 targeting guide sequence portion
ccuugcuucugcauaaaauuuu

SEQ ID NO: 17432 - RNA, 22 nt, Artificial Sequence
  SAMD9 targeting guide sequence portion
ccuuucaccacccccacacccc

SEQ ID NO: 17433 - RNA, 22 nt, Artificial Sequence
  SAMD9 targeting guide sequence portion
ccuuuuagagauacauacuaaa

SEQ ID NO: 17434 - RNA, 22 nt, Artificial Sequence
  SAMD9 targeting guide sequence portion
cgaaacaagauuaguccugagu

SEQ ID NO: 17435 - RNA, 22 nt, Artificial Sequence
  SAMD9 targeting guide sequence portion
cgguucuacuucccuuucacca

SEQ ID NO: 17436 - RNA, 22 nt, Artificial Sequence
  SAMD9 targeting guide sequence portion
cuaaaaggcaugaacucuuuaa

SEQ ID NO: 17437 - RNA, 22 nt, Artificial Sequence
  SAMD9 targeting guide sequence portion
cuaaaaucaauuauuaggcaau

SEQ ID NO: 17438 - RNA, 22 nt, Artificial Sequence
  SAMD9 targeting guide sequence portion
cuaaaguauuuguaaauaaaug

SEQ ID NO: 17439 - RNA, 22 nt, Artificial Sequence
  SAMD9 targeting guide sequence portion
cuaaauguuuuacaagagaaaa

SEQ ID NO: 17440 - RNA, 22 nt, Artificial Sequence
  SAMD9 targeting guide sequence portion
cuaaucuuguuucgguucuacu

SEQ ID NO: 17441 - RNA, 22 nt, Artificial Sequence
  SAMD9 targeting guide sequence portion
cuaaugagauuuugaagacaga

SEQ ID NO: 17442 - RNA, 22 nt, Artificial Sequence
  SAMD9 targeting guide sequence portion
cuacuucccuuucaccaccccc

SEQ ID NO: 17443 - RNA, 22 nt, Artificial Sequence
  SAMD9 targeting guide sequence portion
cuagaaucaguaauuuuguguu

SEQ ID NO: 17444 - RNA, 22 nt, Artificial Sequence
  SAMD9 targeting guide sequence portion
cuagauauuugaggauauuaag

SEQ ID NO: 17445 - RNA, 22 nt, Artificial Sequence
  SAMD9 targeting guide sequence portion
cuagaucaugucauuuauuuac

SEQ ID NO: 17446 - RNA, 22 nt, Artificial Sequence
  SAMD9 targeting guide sequence portion
cuagucuguguucaaauuuuuc

SEQ ID NO: 17447 - RNA, 22 nt, Artificial Sequence
  SAMD9 targeting guide sequence portion
cuauauuauugaagauuccaug

SEQ ID NO: 17448 - RNA, 22 nt, Artificial Sequence
  SAMD9 targeting guide sequence portion
cucaaauaucuagucuguguuc

SEQ ID NO: 17449 - RNA, 22 nt, Artificial Sequence
  SAMD9 targeting guide sequence portion
cucacucuuuauuguuacuuuc

SEQ ID NO: 17450 - RNA, 22 nt, Artificial Sequence
  SAMD9 targeting guide sequence portion
cucaggacuaaucuuguuucgg

SEQ ID NO: 17451 - RNA, 22 nt, Artificial Sequence
  SAMD9 targeting guide sequence portion
cucauuagaauuuuuucacugg

SEQ ID NO: 17452 - RNA, 22 nt, Artificial Sequence
  SAMD9 targeting guide sequence portion
cuccagugaaaaaauucuaaug

SEQ ID NO: 17453 - RNA, 22 nt, Artificial Sequence
  SAMD9 targeting guide sequence portion
cuccauaacuuauaagcucacu

SEQ ID NO: 17454 - RNA, 22 nt, Artificial Sequence
  SAMD9 targeting guide sequence portion
cucccucuuacugauuaugcuu

SEQ ID NO: 17455 - RNA, 22 nt, Artificial Sequence
  SAMD9 targeting guide sequence portion
cucuaaaaggcaugaacucuuu

SEQ ID NO: 17456 - RNA, 22 nt, Artificial Sequence
  SAMD9 targeting guide sequence portion
cucuuacugauuaugcuuuuga

SEQ ID NO: 17457 - RNA, 22 nt, Artificial Sequence
  SAMD9 targeting guide sequence portion
cucuuguaaaacauuuagaaaa

SEQ ID NO: 17458 - RNA, 22 nt, Artificial Sequence
  SAMD9 targeting guide sequence portion
cucuuuaaaaaacauaaccaug

SEQ ID NO: 17459 - RNA, 22 nt, Artificial Sequence
  SAMD9 targeting guide sequence portion
cucuuuauuguuacuuucuaau

SEQ ID NO: 17460 - RNA, 22 nt, Artificial Sequence
  SAMD9 targeting guide sequence portion
cugaauuccauguauccagcuu

SEQ ID NO: 17461 - RNA, 22 nt, Artificial Sequence
  SAMD9 targeting guide sequence portion
cugaguuaacaauggcugcaag

SEQ ID NO: 17462 - RNA, 22 nt, Artificial Sequence
  SAMD9 targeting guide sequence portion
cugauuaugcuuuugaaauuuu

SEQ ID NO: 17463 - RNA, 22 nt, Artificial Sequence
  SAMD9 targeting guide sequence portion
cugauucuagaucaugucauuu

SEQ ID NO: 17464 - RNA, 22 nt, Artificial Sequence
  SAMD9 targeting guide sequence portion
cugauugccuaauaauugauuu

SEQ ID NO: 17465 - RNA, 22 nt, Artificial Sequence
  SAMD9 targeting guide sequence portion
cugcaagcuggauacauggaau

SEQ ID NO: 17466 - RNA, 22 nt, Artificial Sequence
  SAMD9 targeting guide sequence portion
cugcauaaaauuuuaacuccau

SEQ ID NO: 17467 - RNA, 22 nt, Artificial Sequence
  SAMD9 targeting guide sequence portion
cuggaggaagauuuucccuugc

SEQ ID NO: 17468 - RNA, 22 nt, Artificial Sequence
  SAMD9 targeting guide sequence portion
cuggauacauggaauucagcac

SEQ ID NO: 17469 - RNA, 22 nt, Artificial Sequence
  SAMD9 targeting guide sequence portion
cugucuucaaaaucucauuaga

SEQ ID NO: 17470 - RNA, 22 nt, Artificial Sequence
  SAMD9 targeting guide sequence portion
cuguguucaaauuuuucugauu

SEQ ID NO: 17471 - RNA, 22 nt, Artificial Sequence
  SAMD9 targeting guide sequence portion
cuuaauauccucaaauaucuag

SEQ ID NO: 17472 - RNA, 22 nt, Artificial Sequence
  SAMD9 targeting guide sequence portion
cuuacugauuaugcuuuugaaa

SEQ ID NO: 17473 - RNA, 22 nt, Artificial Sequence
  SAMD9 targeting guide sequence portion
cuuauaagcucacucuuuauug

SEQ ID NO: 17474 - RNA, 22 nt, Artificial Sequence
  SAMD9 targeting guide sequence portion
cuucaaaaucucauuagaauuu

SEQ ID NO: 17475 - RNA, 22 nt, Artificial Sequence
  SAMD9 targeting guide sequence portion
cuucaauaauauaguaccuuaa

SEQ ID NO: 17476 - RNA, 22 nt, Artificial Sequence
  SAMD9 targeting guide sequence portion
cuucccuuucaccacccccaca

SEQ ID NO: 17477 - RNA, 22 nt, Artificial Sequence
  SAMD9 targeting guide sequence portion
cuuccuccagugaaaaaauucu

SEQ ID NO: 17478 - RNA, 22 nt, Artificial Sequence
  SAMD9 targeting guide sequence portion
cuucugcauaaaauuuuaacuc

SEQ ID NO: 17479 - RNA, 22 nt, Artificial Sequence
  SAMD9 targeting guide sequence portion
cuugcagccauuguuaacucag

SEQ ID NO: 17480 - RNA, 22 nt, Artificial Sequence
  SAMD9 targeting guide sequence portion
cuugcuucugcauaaaauuuua

SEQ ID NO: 17481 - RNA, 22 nt, Artificial Sequence
  SAMD9 targeting guide sequence portion
cuuguaaaacauuuagaaaaca

SEQ ID NO: 17482 - RNA, 22 nt, Artificial Sequence
  SAMD9 targeting guide sequence portion
cuuguuucgguucuacuucccu

SEQ ID NO: 17483 - RNA, 22 nt, Artificial Sequence
  SAMD9 targeting guide sequence portion
cuuuaaaaaacauaaccaugga

SEQ ID NO: 17484 - RNA, 22 nt, Artificial Sequence
  SAMD9 targeting guide sequence portion
cuuuaguauguaucucuaaaag

SEQ ID NO: 17485 - RNA, 22 nt, Artificial Sequence
  SAMD9 targeting guide sequence portion
cuuuauuguuacuuucuaauug

SEQ ID NO: 17486 - RNA, 22 nt, Artificial Sequence
  SAMD9 targeting guide sequence portion
cuuucaccacccccacacccca

SEQ ID NO: 17487 - RNA, 22 nt, Artificial Sequence
  SAMD9 targeting guide sequence portion
cuuuuagagauacauacuaaag

SEQ ID NO: 17488 - RNA, 22 nt, Artificial Sequence
  SAMD9 targeting guide sequence portion
cuuuucucccucuuacugauua

SEQ ID NO: 17489 - RNA, 22 nt, Artificial Sequence
  SAMD9 targeting guide sequence portion
cuuuugaaauuuucucuuguaa

SEQ ID NO: 17490 - RNA, 22 nt, Artificial Sequence
  SAMD9 targeting guide sequence portion
gaaaaaauucuaaugagauuuu

SEQ ID NO: 17491 - RNA, 22 nt, Artificial Sequence
  SAMD9 targeting guide sequence portion
gaaaaauuugaacacagacuag

SEQ ID NO: 17492 - RNA, 22 nt, Artificial Sequence
  SAMD9 targeting guide sequence portion
gaaaagugugcugaauuccaug

SEQ ID NO: 17493 - RNA, 22 nt, Artificial Sequence
  SAMD9 targeting guide sequence portion
gaaaaucuuccuccagugaaaa

SEQ ID NO: 17494 - RNA, 22 nt, Artificial Sequence
  SAMD9 targeting guide sequence portion
gaaaauuucaaaagcauaauca

SEQ ID NO: 17495 - RNA, 22 nt, Artificial Sequence
  SAMD9 targeting guide sequence portion
gaaacaagauuaguccugaguu

SEQ ID NO: 17496 - RNA, 22 nt, Artificial Sequence
  SAMD9 targeting guide sequence portion
gaaagggaaguagaaccgaaac

SEQ ID NO: 17497 - RNA, 22 nt, Artificial Sequence
  SAMD9 targeting guide sequence portion
gaaaguaacaauaaagagugag

SEQ ID NO: 17498 - RNA, 22 nt, Artificial Sequence
  SAMD9 targeting guide sequence portion
gaaauuuucucuuguaaaacau

SEQ ID NO: 17499 - RNA, 22 nt, Artificial Sequence
  SAMD9 targeting guide sequence portion
gaacacagacuagauauuugag

SEQ ID NO: 17500 - RNA, 22 nt, Artificial Sequence
  SAMD9 targeting guide sequence portion
gaaccgaaacaagauuaguccu

SEQ ID NO: 17501 - RNA, 22 nt, Artificial Sequence
  SAMD9 targeting guide sequence portion
gaacucuuuaaaaaacauaacc

SEQ ID NO: 17502 - RNA, 22 nt, Artificial Sequence
  SAMD9 targeting guide sequence portion
gaagauuccaugguuauguuuu

SEQ ID NO: 17503 - RNA, 22 nt, Artificial Sequence
  SAMD9 targeting guide sequence portion
gaagauuuucccuugcuucugc

SEQ ID NO: 17504 - RNA, 22 nt, Artificial Sequence
  SAMD9 targeting guide sequence portion
gaagcaagggaaaaucuuccuc

SEQ ID NO: 17505 - RNA, 22 nt, Artificial Sequence
  SAMD9 targeting guide sequence portion
gaaguagaaccgaaacaagauu

SEQ ID NO: 17506 - RNA, 22 nt, Artificial Sequence
  SAMD9 targeting guide sequence portion
gaaucaguaauuuuguguuugg

SEQ ID NO: 17507 - RNA, 22 nt, Artificial Sequence
  SAMD9 targeting guide sequence portion
gaaucuucaauaauauaguacc

SEQ ID NO: 17508 - RNA, 22 nt, Artificial Sequence
  SAMD9 targeting guide sequence portion
gaauucagcacacuuuucuccc

SEQ ID NO: 17509 - RNA, 22 nt, Artificial Sequence
  SAMD9 targeting guide sequence portion
gaauuccauguauccagcuugc

SEQ ID NO: 17510 - RNA, 22 nt, Artificial Sequence
  SAMD9 targeting guide sequence portion
gaauuuuuucacuggaggaaga

SEQ ID NO: 17511 - RNA, 22 nt, Artificial Sequence
  SAMD9 targeting guide sequence portion
gacaugaucuagaaucaguaau

SEQ ID NO: 17512 - RNA, 22 nt, Artificial Sequence
  SAMD9 targeting guide sequence portion
gacuaaucuuguuucgguucua

SEQ ID NO: 17513 - RNA, 22 nt, Artificial Sequence
  SAMD9 targeting guide sequence portion
gacuagauauuugaggauauua

SEQ ID NO: 17514 - RNA, 22 nt, Artificial Sequence
  SAMD9 targeting guide sequence portion
gagaaaagugugcugaauucca

SEQ ID NO: 17515 - RNA, 22 nt, Artificial Sequence
  SAMD9 targeting guide sequence portion
gagaaaauuucaaaagcauaau

SEQ ID NO: 17516 - RNA, 22 nt, Artificial Sequence
  SAMD9 targeting guide sequence portion
gagauacauacuaaaguauuug

SEQ ID NO: 17517 - RNA, 22 nt, Artificial Sequence
  SAMD9 targeting guide sequence portion
gagauuuugaagacagaaacaa

SEQ ID NO: 17518 - RNA, 22 nt, Artificial Sequence
  SAMD9 targeting guide sequence portion
gagcuuauaaguuauggaguua

SEQ ID NO: 17519 - RNA, 22 nt, Artificial Sequence
  SAMD9 targeting guide sequence portion
gaggaagauuuucccuugcuuc

SEQ ID NO: 17520 - RNA, 22 nt, Artificial Sequence
  SAMD9 targeting guide sequence portion
gaggauauuaagguacuauauu

SEQ ID NO: 17521 - RNA, 22 nt, Artificial Sequence
  SAMD9 targeting guide sequence portion
gagggagaaaagugugcugaau

SEQ ID NO: 17522 - RNA, 22 nt, Artificial Sequence
  SAMD9 targeting guide sequence portion
gagugagcuuauaaguuaugga

SEQ ID NO: 17523 - RNA, 22 nt, Artificial Sequence
  SAMD9 targeting guide sequence portion
gaguuaaaauuuuaugcagaag

SEQ ID NO: 17524 - RNA, 22 nt, Artificial Sequence
  SAMD9 targeting guide sequence portion
gaguuaacaauggcugcaagcu

SEQ ID NO: 17525 - RNA, 22 nt, Artificial Sequence
  SAMD9 targeting guide sequence portion
gaguucaugccuuuuagagaua

SEQ ID NO: 17526 - RNA, 22 nt, Artificial Sequence
  SAMD9 targeting guide sequence portion
gauacauggaauucagcacacu

SEQ ID NO: 17527 - RNA, 22 nt, Artificial Sequence
  SAMD9 targeting guide sequence portion
gauauuaagguacuauauuauu

SEQ ID NO: 17528 - RNA, 22 nt, Artificial Sequence
  SAMD9 targeting guide sequence portion
gauauuugaggauauuaaggua

SEQ ID NO: 17529 - RNA, 22 nt, Artificial Sequence
  SAMD9 targeting guide sequence portion
gaucaugucauuuauuuacaaa

SEQ ID NO: 17530 - RNA, 22 nt, Artificial Sequence
  SAMD9 targeting guide sequence portion
gaucuagaaucaguaauuuugu

SEQ ID NO: 17531 - RNA, 22 nt, Artificial Sequence
  SAMD9 targeting guide sequence portion
gauuaguccugaguuaacaaug

SEQ ID NO: 17532 - RNA, 22 nt, Artificial Sequence
  SAMD9 targeting guide sequence portion
gauuaugcuuuugaaauuuucu

SEQ ID NO: 17533 - RNA, 22 nt, Artificial Sequence
  SAMD9 targeting guide sequence portion
gauuccaugguuauguuuuuua

SEQ ID NO: 17534 - RNA, 22 nt, Artificial Sequence
  SAMD9 targeting guide sequence portion
gauucuagaucaugucauuuau

SEQ ID NO: 17535 - RNA, 22 nt, Artificial Sequence
  SAMD9 targeting guide sequence portion
gauugccuaauaauugauuuua

SEQ ID NO: 17536 - RNA, 22 nt, Artificial Sequence
  SAMD9 targeting guide sequence portion
gauuuguuucugucuucaaaau

SEQ ID NO: 17537 - RNA, 22 nt, Artificial Sequence
  SAMD9 targeting guide sequence portion
gauuuucccuugcuucugcaua

SEQ ID NO: 17538 - RNA, 22 nt, Artificial Sequence
  SAMD9 targeting guide sequence portion
gauuuugaagacagaaacaaau

SEQ ID NO: 17539 - RNA, 22 nt, Artificial Sequence
  SAMD9 targeting guide sequence portion
gcaagcuggauacauggaauuc

SEQ ID NO: 17540 - RNA, 22 nt, Artificial Sequence
  SAMD9 targeting guide sequence portion
gcaagggaaaaucuuccuccag

SEQ ID NO: 17541 - RNA, 22 nt, Artificial Sequence
  SAMD9 targeting guide sequence portion
gcaaucagaaaaauuugaacac

SEQ ID NO: 17542 - RNA, 22 nt, Artificial Sequence
  SAMD9 targeting guide sequence portion
gcacacuuuucucccucuuacu

SEQ ID NO: 17543 - RNA, 22 nt, Artificial Sequence
  SAMD9 targeting guide sequence portion
gcagaagcaagggaaaaucuuc

SEQ ID NO: 17544 - RNA, 22 nt, Artificial Sequence
  SAMD9 targeting guide sequence portion
gcagccauuguuaacucaggac

SEQ ID NO: 17545 - RNA, 22 nt, Artificial Sequence
  SAMD9 targeting guide sequence portion
gcauaaaauuuuaacuccauaa

SEQ ID NO: 17546 - RNA, 22 nt, Artificial Sequence
  SAMD9 targeting guide sequence portion
gcauaaucaguaagagggagaa

SEQ ID NO: 17547 - RNA, 22 nt, Artificial Sequence
  SAMD9 targeting guide sequence portion
gcaugaacucuuuaaaaaacau

SEQ ID NO: 17548 - RNA, 22 nt, Artificial Sequence
  SAMD9 targeting guide sequence portion
gccauuguuaacucaggacuaa

SEQ ID NO: 17549 - RNA, 22 nt, Artificial Sequence
  SAMD9 targeting guide sequence portion
gccuuuuagagauacauacuaa

SEQ ID NO: 17550 - RNA, 22 nt, Artificial Sequence
  SAMD9 targeting guide sequence portion
gcucacucuuuauuguuacuuu

SEQ ID NO: 17551 - RNA, 22 nt, Artificial Sequence
  SAMD9 targeting guide sequence portion
gcugaauuccauguauccagcu

SEQ ID NO: 17552 - RNA, 22 nt, Artificial Sequence
  SAMD9 targeting guide sequence portion
gcugcaagcuggauacauggaa

SEQ ID NO: 17553 - RNA, 22 nt, Artificial Sequence
  SAMD9 targeting guide sequence portion
gcuggauacauggaauucagca

SEQ ID NO: 17554 - RNA, 22 nt, Artificial Sequence
  SAMD9 targeting guide sequence portion
gcuuauaaguuauggaguuaaa

SEQ ID NO: 17555 - RNA, 22 nt, Artificial Sequence
  SAMD9 targeting guide sequence portion
gcuucugcauaaaauuuuaacu

SEQ ID NO: 17556 - RNA, 22 nt, Artificial Sequence
  SAMD9 targeting guide sequence portion
gcuugcagccauuguuaacuca

SEQ ID NO: 17557 - RNA, 22 nt, Artificial Sequence
  SAMD9 targeting guide sequence portion
gcuuuugaaauuuucucuugua

SEQ ID NO: 17558 - RNA, 22 nt, Artificial Sequence
  SAMD9 targeting guide sequence portion
ggaaaaucuuccuccagugaaa

SEQ ID NO: 17559 - RNA, 22 nt, Artificial Sequence
  SAMD9 targeting guide sequence portion
ggaagauuuucccuugcuucug

SEQ ID NO: 17560 - RNA, 22 nt, Artificial Sequence
  SAMD9 targeting guide sequence portion
ggaaguagaaccgaaacaagau

SEQ ID NO: 17561 - RNA, 22 nt, Artificial Sequence
  SAMD9 targeting guide sequence portion
ggaaucuucaauaauauaguac

SEQ ID NO: 17562 - RNA, 22 nt, Artificial Sequence
  SAMD9 targeting guide sequence portion
ggaauucagcacacuuuucucc

SEQ ID NO: 17563 - RNA, 22 nt, Artificial Sequence
  SAMD9 targeting guide sequence portion
ggacuaaucuuguuucgguucu

SEQ ID NO: 17564 - RNA, 22 nt, Artificial Sequence
  SAMD9 targeting guide sequence portion
ggagaaaagugugcugaauucc

SEQ ID NO: 17565 - RNA, 22 nt, Artificial Sequence
  SAMD9 targeting guide sequence portion
ggaggaagauuuucccuugcuu

SEQ ID NO: 17566 - RNA, 22 nt, Artificial Sequence
  SAMD9 targeting guide sequence portion
ggaguuaaaauuuuaugcagaa

SEQ ID NO: 17567 - RNA, 22 nt, Artificial Sequence
  SAMD9 targeting guide sequence portion
ggauacauggaauucagcacac

SEQ ID NO: 17568 - RNA, 22 nt, Artificial Sequence
  SAMD9 targeting guide sequence portion
ggauauuaagguacuauauuau

SEQ ID NO: 17569 - RNA, 22 nt, Artificial Sequence
  SAMD9 targeting guide sequence portion
ggcaaucagaaaaauuugaaca

SEQ ID NO: 17570 - RNA, 22 nt, Artificial Sequence
  SAMD9 targeting guide sequence portion
ggcaugaacucuuuaaaaaaca

SEQ ID NO: 17571 - RNA, 22 nt, Artificial Sequence
  SAMD9 targeting guide sequence portion
ggcugcaagcuggauacaugga

SEQ ID NO: 17572 - RNA, 22 nt, Artificial Sequence
  SAMD9 targeting guide sequence portion
gggaaaaucuuccuccagugaa

SEQ ID NO: 17573 - RNA, 22 nt, Artificial Sequence
  SAMD9 targeting guide sequence portion
gggaaguagaaccgaaacaaga

SEQ ID NO: 17574 - RNA, 22 nt, Artificial Sequence
  SAMD9 targeting guide sequence portion
gggagaaaagugugcugaauuc

SEQ ID NO: 17575 - RNA, 22 nt, Artificial Sequence
  SAMD9 targeting guide sequence portion
ggggguggugaaagggaaguag

SEQ ID NO: 17576 - RNA, 22 nt, Artificial Sequence
  SAMD9 targeting guide sequence portion
gggguggugaaagggaaguaga

SEQ ID NO: 17577 - RNA, 22 nt, Artificial Sequence
  SAMD9 targeting guide sequence portion
gggguguggggguggugaaagg

SEQ ID NO: 17578 - RNA, 22 nt, Artificial Sequence
  SAMD9 targeting guide sequence portion
ggguggugaaagggaaguagaa

SEQ ID NO: 17579 - RNA, 22 nt, Artificial Sequence
  SAMD9 targeting guide sequence portion
ggguguggggguggugaaaggg

SEQ ID NO: 17580 - RNA, 22 nt, Artificial Sequence
  SAMD9 targeting guide sequence portion
gguacuauauuauugaagauuc

SEQ ID NO: 17581 - RNA, 22 nt, Artificial Sequence
  SAMD9 targeting guide sequence portion
ggugaaagggaaguagaaccga

SEQ ID NO: 17582 - RNA, 22 nt, Artificial Sequence
  SAMD9 targeting guide sequence portion
gguggugaaagggaaguagaac

SEQ ID NO: 17583 - RNA, 22 nt, Artificial Sequence
  SAMD9 targeting guide sequence portion
gguguggggguggugaaaggga

SEQ ID NO: 17584 - RNA, 22 nt, Artificial Sequence
  SAMD9 targeting guide sequence portion
gguuauguuuuuuaaagaguuc

SEQ ID NO: 17585 - RNA, 22 nt, Artificial Sequence
  SAMD9 targeting guide sequence portion
gguucuacuucccuuucaccac

SEQ ID NO: 17586 - RNA, 22 nt, Artificial Sequence
  SAMD9 targeting guide sequence portion
guaaauaaaugacaugaucuag

SEQ ID NO: 17587 - RNA, 22 nt, Artificial Sequence
  SAMD9 targeting guide sequence portion
guaacaauaaagagugagcuua

SEQ ID NO: 17588 - RNA, 22 nt, Artificial Sequence
  SAMD9 targeting guide sequence portion
guaagagggagaaaagugugcu

SEQ ID NO: 17589 - RNA, 22 nt, Artificial Sequence
  SAMD9 targeting guide sequence portion
guaauuuuguguuuggggugug

SEQ ID NO: 17590 - RNA, 22 nt, Artificial Sequence
  SAMD9 targeting guide sequence portion
guaccuuaauauccucaaauau

SEQ ID NO: 17591 - RNA, 22 nt, Artificial Sequence
  SAMD9 targeting guide sequence portion
guacuauauuauugaagauucc

SEQ ID NO: 17592 - RNA, 22 nt, Artificial Sequence
  SAMD9 targeting guide sequence portion
guagaaccgaaacaagauuagu

SEQ ID NO: 17593 - RNA, 22 nt, Artificial Sequence
  SAMD9 targeting guide sequence portion
guauccagcuugcagccauugu

SEQ ID NO: 17594 - RNA, 22 nt, Artificial Sequence
  SAMD9 targeting guide sequence portion
guaucucuaaaaggcaugaacu

SEQ ID NO: 17595 - RNA, 22 nt, Artificial Sequence
  SAMD9 targeting guide sequence portion
guauguaucucuaaaaggcaug

SEQ ID NO: 17596 - RNA, 22 nt, Artificial Sequence
  SAMD9 targeting guide sequence portion
guauuuguaaauaaaugacaug

SEQ ID NO: 17597 - RNA, 22 nt, Artificial Sequence
  SAMD9 targeting guide sequence portion
gucaauuagaaaguaacaauaa

SEQ ID NO: 17598 - RNA, 22 nt, Artificial Sequence
  SAMD9 targeting guide sequence portion
gucauuuauuuacaaauacuuu

SEQ ID NO: 17599 - RNA, 22 nt, Artificial Sequence
  SAMD9 targeting guide sequence portion
guccugaguuaacaauggcugc

SEQ ID NO: 17600 - RNA, 22 nt, Artificial Sequence
  SAMD9 targeting guide sequence portion
gucuguguucaaauuuuucuga

SEQ ID NO: 17601 - RNA, 22 nt, Artificial Sequence
  SAMD9 targeting guide sequence portion
gucuucaaaaucucauuagaau

SEQ ID NO: 17602 - RNA, 22 nt, Artificial Sequence
  SAMD9 targeting guide sequence portion
gugaaaaaauucuaaugagauu

SEQ ID NO: 17603 - RNA, 22 nt, Artificial Sequence
  SAMD9 targeting guide sequence portion
gugaaagggaaguagaaccgaa

SEQ ID NO: 17604 - RNA, 22 nt, Artificial Sequence
  SAMD9 targeting guide sequence portion
gugagcuuauaaguuauggagu

SEQ ID NO: 17605 - RNA, 22 nt, Artificial Sequence
  SAMD9 targeting guide sequence portion
gugauuuguuucugucuucaaa

SEQ ID NO: 17606 - RNA, 22 nt, Artificial Sequence
  SAMD9 targeting guide sequence portion
gugcugaauuccauguauccag

SEQ ID NO: 17607 - RNA, 22 nt, Artificial Sequence
  SAMD9 targeting guide sequence portion
guggggguggugaaagggaagu

SEQ ID NO: 17608 - RNA, 22 nt, Artificial Sequence
  SAMD9 targeting guide sequence portion
guggugaaagggaaguagaacc

SEQ ID NO: 17609 - RNA, 22 nt, Artificial Sequence
  SAMD9 targeting guide sequence portion
gugugcugaauuccauguaucc

SEQ ID NO: 17610 - RNA, 22 nt, Artificial Sequence
  SAMD9 targeting guide sequence portion
guguggggguggugaaagggaa

SEQ ID NO: 17611 - RNA, 22 nt, Artificial Sequence
  SAMD9 targeting guide sequence portion
guguucaaauuuuucugauugc

SEQ ID NO: 17612 - RNA, 22 nt, Artificial Sequence
  SAMD9 targeting guide sequence portion
guguuugggguguggggguggu

SEQ ID NO: 17613 - RNA, 22 nt, Artificial Sequence
  SAMD9 targeting guide sequence portion
guuaaaauuuuaugcagaagca

SEQ ID NO: 17614 - RNA, 22 nt, Artificial Sequence
  SAMD9 targeting guide sequence portion
guuaacaauggcugcaagcugg

SEQ ID NO: 17615 - RNA, 22 nt, Artificial Sequence
  SAMD9 targeting guide sequence portion
guuaacucaggacuaaucuugu

SEQ ID NO: 17616 - RNA, 22 nt, Artificial Sequence
  SAMD9 targeting guide sequence portion
guuauggaguuaaaauuuuaug

SEQ ID NO: 17617 - RNA, 22 nt, Artificial Sequence
  SAMD9 targeting guide sequence portion
guuauguuuuuuaaagaguuca

SEQ ID NO: 17618 - RNA, 22 nt, Artificial Sequence
  SAMD9 targeting guide sequence portion
guucaaauuuuucugauugccu

SEQ ID NO: 17619 - RNA, 22 nt, Artificial Sequence
  SAMD9 targeting guide sequence portion
guucaugccuuuuagagauaca

SEQ ID NO: 17620 - RNA, 22 nt, Artificial Sequence
  SAMD9 targeting guide sequence portion
guucuacuucccuuucaccacc

SEQ ID NO: 17621 - RNA, 22 nt, Artificial Sequence
  SAMD9 targeting guide sequence portion
guuucgguucuacuucccuuuc

SEQ ID NO: 17622 - RNA, 22 nt, Artificial Sequence
  SAMD9 targeting guide sequence portion
guuucugucuucaaaaucucau

SEQ ID NO: 17623 - RNA, 22 nt, Artificial Sequence
  SAMD9 targeting guide sequence portion
guuuggggugugggggugguga

SEQ ID NO: 17624 - RNA, 22 nt, Artificial Sequence
  SAMD9 targeting guide sequence portion
guuuuacaagagaaaauuucaa

SEQ ID NO: 17625 - RNA, 22 nt, Artificial Sequence
  SAMD9 targeting guide sequence portion
guuuucuaaauguuuuacaaga

SEQ ID NO: 17626 - RNA, 22 nt, Artificial Sequence
  SAMD9 targeting guide sequence portion
guuuuuguuuucuaaauguuuu

SEQ ID NO: 17627 - RNA, 22 nt, Artificial Sequence
  SAMD9 targeting guide sequence portion
guuuuuuaaagaguucaugccu

SEQ ID NO: 17628 - RNA, 22 nt, Artificial Sequence
  SAMD9 targeting guide sequence portion
uaaaaaacauaaccauggaauc

SEQ ID NO: 17629 - RNA, 22 nt, Artificial Sequence
  SAMD9 targeting guide sequence portion
uaaaaggcaugaacucuuuaaa

SEQ ID NO: 17630 - RNA, 22 nt, Artificial Sequence
  SAMD9 targeting guide sequence portion
uaaaaucaauuauuaggcaauc

SEQ ID NO: 17631 - RNA, 22 nt, Artificial Sequence
  SAMD9 targeting guide sequence portion
uaaaauuuuaacuccauaacuu

SEQ ID NO: 17632 - RNA, 22 nt, Artificial Sequence
  SAMD9 targeting guide sequence portion
uaaaauuuuaugcagaagcaag

SEQ ID NO: 17633 - RNA, 22 nt, Artificial Sequence
  SAMD9 targeting guide sequence portion
uaaagagugagcuuauaaguua

SEQ ID NO: 17634 - RNA, 22 nt, Artificial Sequence
  SAMD9 targeting guide sequence portion
uaaagaguucaugccuuuuaga

SEQ ID NO: 17635 - RNA, 22 nt, Artificial Sequence
  SAMD9 targeting guide sequence portion
uaaauaaaugacaugaucuaga

SEQ ID NO: 17636 - RNA, 22 nt, Artificial Sequence
  SAMD9 targeting guide sequence portion
uaaaugacaugaucuagaauca

SEQ ID NO: 17637 - RNA, 22 nt, Artificial Sequence
  SAMD9 targeting guide sequence portion
uaacaauaaagagugagcuuau

SEQ ID NO: 17638 - RNA, 22 nt, Artificial Sequence
  SAMD9 targeting guide sequence portion
uaacaauggcugcaagcuggau

SEQ ID NO: 17639 - RNA, 22 nt, Artificial Sequence
  SAMD9 targeting guide sequence portion
uaaccauggaaucuucaauaau

SEQ ID NO: 17640 - RNA, 22 nt, Artificial Sequence
  SAMD9 targeting guide sequence portion
uaacucaggacuaaucuuguuu

SEQ ID NO: 17641 - RNA, 22 nt, Artificial Sequence
  SAMD9 targeting guide sequence portion
uaacuccauaacuuauaagcuc

SEQ ID NO: 17642 - RNA, 22 nt, Artificial Sequence
  SAMD9 targeting guide sequence portion
uaacuuauaagcucacucuuua

SEQ ID NO: 17643 - RNA, 22 nt, Artificial Sequence
  SAMD9 targeting guide sequence portion
uaagagggagaaaagugugcug

SEQ ID NO: 17644 - RNA, 22 nt, Artificial Sequence
  SAMD9 targeting guide sequence portion
uaagcucacucuuuauuguuac

SEQ ID NO: 17645 - RNA, 22 nt, Artificial Sequence
  SAMD9 targeting guide sequence portion
uaagguacuauauuauugaaga

SEQ ID NO: 17646 - RNA, 22 nt, Artificial Sequence
  SAMD9 targeting guide sequence portion
uaaguuauggaguuaaaauuuu

SEQ ID NO: 17647 - RNA, 22 nt, Artificial Sequence
  SAMD9 targeting guide sequence portion
uaauauaguaccuuaauauccu

SEQ ID NO: 17648 - RNA, 22 nt, Artificial Sequence
  SAMD9 targeting guide sequence portion
uaauauccucaaauaucuaguc

SEQ ID NO: 17649 - RNA, 22 nt, Artificial Sequence
  SAMD9 targeting guide sequence portion
uaaucaguaagagggagaaaag

SEQ ID NO: 17650 - RNA, 22 nt, Artificial Sequence
  SAMD9 targeting guide sequence portion
uaaucuuguuucgguucuacuu

SEQ ID NO: 17651 - RNA, 22 nt, Artificial Sequence
  SAMD9 targeting guide sequence portion
uaaugagauuuugaagacagaa

SEQ ID NO: 17652 - RNA, 22 nt, Artificial Sequence
  SAMD9 targeting guide sequence portion
uaauuuuguguuuggggugugg

SEQ ID NO: 17653 - RNA, 22 nt, Artificial Sequence
  SAMD9 targeting guide sequence portion
uacaaauacuuuaguauguauc

SEQ ID NO: 17654 - RNA, 22 nt, Artificial Sequence
  SAMD9 targeting guide sequence portion
uacaagagaaaauuucaaaagc

SEQ ID NO: 17655 - RNA, 22 nt, Artificial Sequence
  SAMD9 targeting guide sequence portion
uacauggaauucagcacacuuu

SEQ ID NO: 17656 - RNA, 22 nt, Artificial Sequence
  SAMD9 targeting guide sequence portion
uaccuuaauauccucaaauauc

SEQ ID NO: 17657 - RNA, 22 nt, Artificial Sequence
  SAMD9 targeting guide sequence portion
uacuauauuauugaagauucca

SEQ ID NO: 17658 - RNA, 22 nt, Artificial Sequence
  SAMD9 targeting guide sequence portion
uacugauuaugcuuuugaaauu

SEQ ID NO: 17659 - RNA, 22 nt, Artificial Sequence
  SAMD9 targeting guide sequence portion
uacugauucuagaucaugucau

SEQ ID NO: 17660 - RNA, 22 nt, Artificial Sequence
  SAMD9 targeting guide sequence portion
uacuucccuuucaccaccccca

SEQ ID NO: 17661 - RNA, 22 nt, Artificial Sequence
  SAMD9 targeting guide sequence portion
uacuuuaguauguaucucuaaa

SEQ ID NO: 17662 - RNA, 22 nt, Artificial Sequence
  SAMD9 targeting guide sequence portion
uagaaaguaacaauaaagagug

SEQ ID NO: 17663 - RNA, 22 nt, Artificial Sequence
  SAMD9 targeting guide sequence portion
uagaaccgaaacaagauuaguc

SEQ ID NO: 17664 - RNA, 22 nt, Artificial Sequence
  SAMD9 targeting guide sequence portion
uagaaucaguaauuuuguguuu

SEQ ID NO: 17665 - RNA, 22 nt, Artificial Sequence
  SAMD9 targeting guide sequence portion
uagaauuuuuucacuggaggaa

SEQ ID NO: 17666 - RNA, 22 nt, Artificial Sequence
  SAMD9 targeting guide sequence portion
uagagauacauacuaaaguauu

SEQ ID NO: 17667 - RNA, 22 nt, Artificial Sequence
  SAMD9 targeting guide sequence portion
uagauauuugaggauauuaagg

SEQ ID NO: 17668 - RNA, 22 nt, Artificial Sequence
  SAMD9 targeting guide sequence portion
uagaucaugucauuuauuuaca

SEQ ID NO: 17669 - RNA, 22 nt, Artificial Sequence
  SAMD9 targeting guide sequence portion
uaggcaaucagaaaaauuugaa

SEQ ID NO: 17670 - RNA, 22 nt, Artificial Sequence
  SAMD9 targeting guide sequence portion
uaguaccuuaauauccucaaau

SEQ ID NO: 17671 - RNA, 22 nt, Artificial Sequence
  SAMD9 targeting guide sequence portion
uaguauguaucucuaaaaggca

SEQ ID NO: 17672 - RNA, 22 nt, Artificial Sequence
  SAMD9 targeting guide sequence portion
uaguccugaguuaacaauggcu

SEQ ID NO: 17673 - RNA, 22 nt, Artificial Sequence
  SAMD9 targeting guide sequence portion
uagucuguguucaaauuuuucu

SEQ ID NO: 17674 - RNA, 22 nt, Artificial Sequence
  SAMD9 targeting guide sequence portion
uauaagcucacucuuuauuguu

SEQ ID NO: 17675 - RNA, 22 nt, Artificial Sequence
  SAMD9 targeting guide sequence portion
uauaaguuauggaguuaaaauu

SEQ ID NO: 17676 - RNA, 22 nt, Artificial Sequence
  SAMD9 targeting guide sequence portion
uauaguaccuuaauauccucaa

SEQ ID NO: 17677 - RNA, 22 nt, Artificial Sequence
  SAMD9 targeting guide sequence portion
uauauuauugaagauuccaugg

SEQ ID NO: 17678 - RNA, 22 nt, Artificial Sequence
  SAMD9 targeting guide sequence portion
uauccagcuugcagccauuguu

SEQ ID NO: 17679 - RNA, 22 nt, Artificial Sequence
  SAMD9 targeting guide sequence portion
uauccucaaauaucuagucugu

SEQ ID NO: 17680 - RNA, 22 nt, Artificial Sequence
  SAMD9 targeting guide sequence portion
uaucuagucuguguucaaauuu

SEQ ID NO: 17681 - RNA, 22 nt, Artificial Sequence
  SAMD9 targeting guide sequence portion
uaucucuaaaaggcaugaacuc

SEQ ID NO: 17682 - RNA, 22 nt, Artificial Sequence
  SAMD9 targeting guide sequence portion
uaugcagaagcaagggaaaauc

SEQ ID NO: 17683 - RNA, 22 nt, Artificial Sequence
  SAMD9 targeting guide sequence portion
uaugcuuuugaaauuuucucuu

SEQ ID NO: 17684 - RNA, 22 nt, Artificial Sequence
  SAMD9 targeting guide sequence portion
uauggaguuaaaauuuuaugca

SEQ ID NO: 17685 - RNA, 22 nt, Artificial Sequence
  SAMD9 targeting guide sequence portion
uauguaucucuaaaaggcauga

SEQ ID NO: 17686 - RNA, 22 nt, Artificial Sequence
  SAMD9 targeting guide sequence portion
uauguuuuuuaaagaguucaug

SEQ ID NO: 17687 - RNA, 22 nt, Artificial Sequence
  SAMD9 targeting guide sequence portion
uauuaagguacuauauuauuga

SEQ ID NO: 17688 - RNA, 22 nt, Artificial Sequence
  SAMD9 targeting guide sequence portion
uauuaggcaaucagaaaaauuu

SEQ ID NO: 17689 - RNA, 22 nt, Artificial Sequence
  SAMD9 targeting guide sequence portion
uauuauugaagauuccaugguu

SEQ ID NO: 17690 - RNA, 22 nt, Artificial Sequence
  SAMD9 targeting guide sequence portion
uauugaagauuccaugguuaug

SEQ ID NO: 17691 - RNA, 22 nt, Artificial Sequence
  SAMD9 targeting guide sequence portion
uauuuacaaauacuuuaguaug

SEQ ID NO: 17692 - RNA, 22 nt, Artificial Sequence
  SAMD9 targeting guide sequence portion
uauuugaggauauuaagguacu

SEQ ID NO: 17693 - RNA, 22 nt, Artificial Sequence
  SAMD9 targeting guide sequence portion
uauuuguaaauaaaugacauga

SEQ ID NO: 17694 - RNA, 22 nt, Artificial Sequence
  SAMD9 targeting guide sequence portion
ucaaaagcauaaucaguaagag

SEQ ID NO: 17695 - RNA, 22 nt, Artificial Sequence
  SAMD9 targeting guide sequence portion
ucaaaaucucauuagaauuuuu

SEQ ID NO: 17696 - RNA, 22 nt, Artificial Sequence
  SAMD9 targeting guide sequence portion
ucaaauaucuagucuguguuca

SEQ ID NO: 17697 - RNA, 22 nt, Artificial Sequence
  SAMD9 targeting guide sequence portion
ucaaauuuuucugauugccuaa

SEQ ID NO: 17698 - RNA, 22 nt, Artificial Sequence
  SAMD9 targeting guide sequence portion
ucaauaauauaguaccuuaaua

SEQ ID NO: 17699 - RNA, 22 nt, Artificial Sequence
  SAMD9 targeting guide sequence portion
ucaauuagaaaguaacaauaaa

SEQ ID NO: 17700 - RNA, 22 nt, Artificial Sequence
  SAMD9 targeting guide sequence portion
ucaauuauuaggcaaucagaaa

SEQ ID NO: 17701 - RNA, 22 nt, Artificial Sequence
  SAMD9 targeting guide sequence portion
ucaccacccccacaccccaaac

SEQ ID NO: 17702 - RNA, 22 nt, Artificial Sequence
  SAMD9 targeting guide sequence portion
ucacucuuuauuguuacuuucu

SEQ ID NO: 17703 - RNA, 22 nt, Artificial Sequence
  SAMD9 targeting guide sequence portion
ucacuggaggaagauuuucccu

SEQ ID NO: 17704 - RNA, 22 nt, Artificial Sequence
  SAMD9 targeting guide sequence portion
ucagaaaaauuugaacacagac

SEQ ID NO: 17705 - RNA, 22 nt, Artificial Sequence
  SAMD9 targeting guide sequence portion
ucagcacacuuuucucccucuu

SEQ ID NO: 17706 - RNA, 22 nt, Artificial Sequence
  SAMD9 targeting guide sequence portion
ucaggacuaaucuuguuucggu

SEQ ID NO: 17707 - RNA, 22 nt, Artificial Sequence
  SAMD9 targeting guide sequence portion
ucaguaagagggagaaaagugu

SEQ ID NO: 17708 - RNA, 22 nt, Artificial Sequence
  SAMD9 targeting guide sequence portion
ucaguaauuuuguguuuggggu

SEQ ID NO: 17709 - RNA, 22 nt, Artificial Sequence
  SAMD9 targeting guide sequence portion
ucaugccuuuuagagauacaua

SEQ ID NO: 17710 - RNA, 22 nt, Artificial Sequence
  SAMD9 targeting guide sequence portion
ucaugucauuuauuuacaaaua

SEQ ID NO: 17711 - RNA, 22 nt, Artificial Sequence
  SAMD9 targeting guide sequence portion
ucauuagaauuuuuucacugga

SEQ ID NO: 17712 - RNA, 22 nt, Artificial Sequence
  SAMD9 targeting guide sequence portion
uccagcuugcagccauuguuaa

SEQ ID NO: 17713 - RNA, 22 nt, Artificial Sequence
  SAMD9 targeting guide sequence portion
uccagugaaaaaauucuaauga

SEQ ID NO: 17714 - RNA, 22 nt, Artificial Sequence
  SAMD9 targeting guide sequence portion
uccauaacuuauaagcucacuc

SEQ ID NO: 17715 - RNA, 22 nt, Artificial Sequence
  SAMD9 targeting guide sequence portion
uccaugguuauguuuuuuaaag

SEQ ID NO: 17716 - RNA, 22 nt, Artificial Sequence
  SAMD9 targeting guide sequence portion
uccauguauccagcuugcagcc

SEQ ID NO: 17717 - RNA, 22 nt, Artificial Sequence
  SAMD9 targeting guide sequence portion
ucccucuuacugauuaugcuuu

SEQ ID NO: 17718 - RNA, 22 nt, Artificial Sequence
  SAMD9 targeting guide sequence portion
ucccuugcuucugcauaaaauu

SEQ ID NO: 17719 - RNA, 22 nt, Artificial Sequence
  SAMD9 targeting guide sequence portion
ucccuuucaccacccccacacc

SEQ ID NO: 17720 - RNA, 22 nt, Artificial Sequence
  SAMD9 targeting guide sequence portion
uccucaaauaucuagucugugu

SEQ ID NO: 17721 - RNA, 22 nt, Artificial Sequence
  SAMD9 targeting guide sequence portion
uccuccagugaaaaaauucuaa

SEQ ID NO: 17722 - RNA, 22 nt, Artificial Sequence
  SAMD9 targeting guide sequence portion
uccugaguuaacaauggcugca

SEQ ID NO: 17723 - RNA, 22 nt, Artificial Sequence
  SAMD9 targeting guide sequence portion
ucgguucuacuucccuuucacc

SEQ ID NO: 17724 - RNA, 22 nt, Artificial Sequence
  SAMD9 targeting guide sequence portion
ucuaaaaggcaugaacucuuua

SEQ ID NO: 17725 - RNA, 22 nt, Artificial Sequence
  SAMD9 targeting guide sequence portion
ucuaaaaucaauuauuaggcaa

SEQ ID NO: 17726 - RNA, 22 nt, Artificial Sequence
  SAMD9 targeting guide sequence portion
ucuaaauguuuuacaagagaaa

SEQ ID NO: 17727 - RNA, 22 nt, Artificial Sequence
  SAMD9 targeting guide sequence portion
ucuaaugagauuuugaagacag

SEQ ID NO: 17728 - RNA, 22 nt, Artificial Sequence
  SAMD9 targeting guide sequence portion
ucuacuucccuuucaccacccc

SEQ ID NO: 17729 - RNA, 22 nt, Artificial Sequence
  SAMD9 targeting guide sequence portion
ucuagaaucaguaauuuugugu

SEQ ID NO: 17730 - RNA, 22 nt, Artificial Sequence
  SAMD9 targeting guide sequence portion
ucuagaucaugucauuuauuua

SEQ ID NO: 17731 - RNA, 22 nt, Artificial Sequence
  SAMD9 targeting guide sequence portion
ucuagucuguguucaaauuuuu

SEQ ID NO: 17732 - RNA, 22 nt, Artificial Sequence
  SAMD9 targeting guide sequence portion
ucucauuagaauuuuuucacug

SEQ ID NO: 17733 - RNA, 22 nt, Artificial Sequence
  SAMD9 targeting guide sequence portion
ucucccucuuacugauuaugcu

SEQ ID NO: 17734 - RNA, 22 nt, Artificial Sequence
  SAMD9 targeting guide sequence portion
ucucuaaaaggcaugaacucuu

SEQ ID NO: 17735 - RNA, 22 nt, Artificial Sequence
  SAMD9 targeting guide sequence portion
ucucuuguaaaacauuuagaaa

SEQ ID NO: 17736 - RNA, 22 nt, Artificial Sequence
  SAMD9 targeting guide sequence portion
ucugauugccuaauaauugauu

SEQ ID NO: 17737 - RNA, 22 nt, Artificial Sequence
  SAMD9 targeting guide sequence portion
ucugcauaaaauuuuaacucca

SEQ ID NO: 17738 - RNA, 22 nt, Artificial Sequence
  SAMD9 targeting guide sequence portion
ucugucuucaaaaucucauuag

SEQ ID NO: 17739 - RNA, 22 nt, Artificial Sequence
  SAMD9 targeting guide sequence portion
ucuguguucaaauuuuucugau

SEQ ID NO: 17740 - RNA, 22 nt, Artificial Sequence
  SAMD9 targeting guide sequence portion
ucuuacugauuaugcuuuugaa

SEQ ID NO: 17741 - RNA, 22 nt, Artificial Sequence
  SAMD9 targeting guide sequence portion
ucuucaaaaucucauuagaauu

SEQ ID NO: 17742 - RNA, 22 nt, Artificial Sequence
  SAMD9 targeting guide sequence portion
ucuucaauaauauaguaccuua

SEQ ID NO: 17743 - RNA, 22 nt, Artificial Sequence
  SAMD9 targeting guide sequence portion
ucuuccuccagugaaaaaauuc

SEQ ID NO: 17744 - RNA, 22 nt, Artificial Sequence
  SAMD9 targeting guide sequence portion
ucuuguaaaacauuuagaaaac

SEQ ID NO: 17745 - RNA, 22 nt, Artificial Sequence
  SAMD9 targeting guide sequence portion
ucuuguuucgguucuacuuccc

SEQ ID NO: 17746 - RNA, 22 nt, Artificial Sequence
  SAMD9 targeting guide sequence portion
ucuuuaaaaaacauaaccaugg

SEQ ID NO: 17747 - RNA, 22 nt, Artificial Sequence
  SAMD9 targeting guide sequence portion
ucuuuauuguuacuuucuaauu

SEQ ID NO: 17748 - RNA, 22 nt, Artificial Sequence
  SAMD9 targeting guide sequence portion
ugaaaaaauucuaaugagauuu

SEQ ID NO: 17749 - RNA, 22 nt, Artificial Sequence
  SAMD9 targeting guide sequence portion
ugaaagggaaguagaaccgaaa

SEQ ID NO: 17750 - RNA, 22 nt, Artificial Sequence
  SAMD9 targeting guide sequence portion
ugaaauuuucucuuguaaaaca

SEQ ID NO: 17751 - RNA, 22 nt, Artificial Sequence
  SAMD9 targeting guide sequence portion
ugaacacagacuagauauuuga

SEQ ID NO: 17752 - RNA, 22 nt, Artificial Sequence
  SAMD9 targeting guide sequence portion
ugaacucuuuaaaaaacauaac

SEQ ID NO: 17753 - RNA, 22 nt, Artificial Sequence
  SAMD9 targeting guide sequence portion
ugaagauuccaugguuauguuu

SEQ ID NO: 17754 - RNA, 22 nt, Artificial Sequence
  SAMD9 targeting guide sequence portion
ugaauuccauguauccagcuug

SEQ ID NO: 17755 - RNA, 22 nt, Artificial Sequence
  SAMD9 targeting guide sequence portion
ugacaugaucuagaaucaguaa

SEQ ID NO: 17756 - RNA, 22 nt, Artificial Sequence
  SAMD9 targeting guide sequence portion
ugagauuuugaagacagaaaca

SEQ ID NO: 17757 - RNA, 22 nt, Artificial Sequence
  SAMD9 targeting guide sequence portion
ugagcuuauaaguuauggaguu

SEQ ID NO: 17758 - RNA, 22 nt, Artificial Sequence
  SAMD9 targeting guide sequence portion
ugaggauauuaagguacuauau

SEQ ID NO: 17759 - RNA, 22 nt, Artificial Sequence
  SAMD9 targeting guide sequence portion
ugaguuaacaauggcugcaagc

SEQ ID NO: 17760 - RNA, 22 nt, Artificial Sequence
  SAMD9 targeting guide sequence portion
ugaucuagaaucaguaauuuug

SEQ ID NO: 17761 - RNA, 22 nt, Artificial Sequence
  SAMD9 targeting guide sequence portion
ugauuaugcuuuugaaauuuuc

SEQ ID NO: 17762 - RNA, 22 nt, Artificial Sequence
  SAMD9 targeting guide sequence portion
ugauucuagaucaugucauuua

SEQ ID NO: 17763 - RNA, 22 nt, Artificial Sequence
  SAMD9 targeting guide sequence portion
ugauugccuaauaauugauuuu

SEQ ID NO: 17764 - RNA, 22 nt, Artificial Sequence
  SAMD9 targeting guide sequence portion
ugauuuguuucugucuucaaaa

SEQ ID NO: 17765 - RNA, 22 nt, Artificial Sequence
  SAMD9 targeting guide sequence portion
ugcaagcuggauacauggaauu

SEQ ID NO: 17766 - RNA, 22 nt, Artificial Sequence
  SAMD9 targeting guide sequence portion
ugcagaagcaagggaaaaucuu

SEQ ID NO: 17767 - RNA, 22 nt, Artificial Sequence
  SAMD9 targeting guide sequence portion
ugcagccauuguuaacucagga

SEQ ID NO: 17768 - RNA, 22 nt, Artificial Sequence
  SAMD9 targeting guide sequence portion
ugcauaaaauuuuaacuccaua

SEQ ID NO: 17769 - RNA, 22 nt, Artificial Sequence
  SAMD9 targeting guide sequence portion
ugccuuuuagagauacauacua

SEQ ID NO: 17770 - RNA, 22 nt, Artificial Sequence
  SAMD9 targeting guide sequence portion
ugcugaauuccauguauccagc

SEQ ID NO: 17771 - RNA, 22 nt, Artificial Sequence
  SAMD9 targeting guide sequence portion
ugcuucugcauaaaauuuuaac

SEQ ID NO: 17772 - RNA, 22 nt, Artificial Sequence
  SAMD9 targeting guide sequence portion
ugcuuuugaaauuuucucuugu

SEQ ID NO: 17773 - RNA, 22 nt, Artificial Sequence
  SAMD9 targeting guide sequence portion
uggaaucuucaauaauauagua

SEQ ID NO: 17774 - RNA, 22 nt, Artificial Sequence
  SAMD9 targeting guide sequence portion
uggaauucagcacacuuuucuc

SEQ ID NO: 17775 - RNA, 22 nt, Artificial Sequence
  SAMD9 targeting guide sequence portion
uggaggaagauuuucccuugcu

SEQ ID NO: 17776 - RNA, 22 nt, Artificial Sequence
  SAMD9 targeting guide sequence portion
uggaguuaaaauuuuaugcaga

SEQ ID NO: 17777 - RNA, 22 nt, Artificial Sequence
  SAMD9 targeting guide sequence portion
uggauacauggaauucagcaca

SEQ ID NO: 17778 - RNA, 22 nt, Artificial Sequence
  SAMD9 targeting guide sequence portion
uggcugcaagcuggauacaugg

SEQ ID NO: 17779 - RNA, 22 nt, Artificial Sequence
  SAMD9 targeting guide sequence portion
uggggguggugaaagggaagua

SEQ ID NO: 17780 - RNA, 22 nt, Artificial Sequence
  SAMD9 targeting guide sequence portion
ugggguguggggguggugaaag

SEQ ID NO: 17781 - RNA, 22 nt, Artificial Sequence
  SAMD9 targeting guide sequence portion
uggugaaagggaaguagaaccg

SEQ ID NO: 17782 - RNA, 22 nt, Artificial Sequence
  SAMD9 targeting guide sequence portion
ugguuauguuuuuuaaagaguu

SEQ ID NO: 17783 - RNA, 22 nt, Artificial Sequence
  SAMD9 targeting guide sequence portion
uguaaauaaaugacaugaucua

SEQ ID NO: 17784 - RNA, 22 nt, Artificial Sequence
  SAMD9 targeting guide sequence portion
uguauccagcuugcagccauug

SEQ ID NO: 17785 - RNA, 22 nt, Artificial Sequence
  SAMD9 targeting guide sequence portion
uguaucucuaaaaggcaugaac

SEQ ID NO: 17786 - RNA, 22 nt, Artificial Sequence
  SAMD9 targeting guide sequence portion
ugucaauuagaaaguaacaaua

SEQ ID NO: 17787 - RNA, 22 nt, Artificial Sequence
  SAMD9 targeting guide sequence portion
ugucuucaaaaucucauuagaa

SEQ ID NO: 17788 - RNA, 22 nt, Artificial Sequence
  SAMD9 targeting guide sequence portion
ugugauuuguuucugucuucaa

SEQ ID NO: 17789 - RNA, 22 nt, Artificial Sequence
  SAMD9 targeting guide sequence portion
ugugcugaauuccauguaucca

SEQ ID NO: 17790 - RNA, 22 nt, Artificial Sequence
  SAMD9 targeting guide sequence portion
uguggggguggugaaagggaag

SEQ ID NO: 17791 - RNA, 22 nt, Artificial Sequence
  SAMD9 targeting guide sequence portion
uguguucaaauuuuucugauug

SEQ ID NO: 17792 - RNA, 22 nt, Artificial Sequence
  SAMD9 targeting guide sequence portion
uguguuuggggugugggggugg

SEQ ID NO: 17793 - RNA, 22 nt, Artificial Sequence
  SAMD9 targeting guide sequence portion
uguuaacucaggacuaaucuug

SEQ ID NO: 17794 - RNA, 22 nt, Artificial Sequence
  SAMD9 targeting guide sequence portion
uguucaaauuuuucugauugcc

SEQ ID NO: 17795 - RNA, 22 nt, Artificial Sequence
  SAMD9 targeting guide sequence portion
uguuucgguucuacuucccuuu

SEQ ID NO: 17796 - RNA, 22 nt, Artificial Sequence
  SAMD9 targeting guide sequence portion
uguuucugucuucaaaaucuca

SEQ ID NO: 17797 - RNA, 22 nt, Artificial Sequence
  SAMD9 targeting guide sequence portion
uguuugggguguggggguggug

SEQ ID NO: 17798 - RNA, 22 nt, Artificial Sequence
  SAMD9 targeting guide sequence portion
uguuuuacaagagaaaauuuca

SEQ ID NO: 17799 - RNA, 22 nt, Artificial Sequence
  SAMD9 targeting guide sequence portion
uguuuucuaaauguuuuacaag

SEQ ID NO: 17800 - RNA, 22 nt, Artificial Sequence
  SAMD9 targeting guide sequence portion
uguuuuuguuuucuaaauguuu

SEQ ID NO: 17801 - RNA, 22 nt, Artificial Sequence
  SAMD9 targeting guide sequence portion
uguuuuuuaaagaguucaugcc

SEQ ID NO: 17802 - RNA, 22 nt, Artificial Sequence
  SAMD9 targeting guide sequence portion
uuaaaaaacauaaccauggaau

SEQ ID NO: 17803 - RNA, 22 nt, Artificial Sequence
  SAMD9 targeting guide sequence portion
uuaaaauuuuaugcagaagcaa

SEQ ID NO: 17804 - RNA, 22 nt, Artificial Sequence
  SAMD9 targeting guide sequence portion
uuaaagaguucaugccuuuuag

SEQ ID NO: 17805 - RNA, 22 nt, Artificial Sequence
  SAMD9 targeting guide sequence portion
uuaacaauggcugcaagcugga

SEQ ID NO: 17806 - RNA, 22 nt, Artificial Sequence
  SAMD9 targeting guide sequence portion
uuaacucaggacuaaucuuguu

SEQ ID NO: 17807 - RNA, 22 nt, Artificial Sequence
  SAMD9 targeting guide sequence portion
uuaacuccauaacuuauaagcu

SEQ ID NO: 17808 - RNA, 22 nt, Artificial Sequence
  SAMD9 targeting guide sequence portion
uuaagguacuauauuauugaag

SEQ ID NO: 17809 - RNA, 22 nt, Artificial Sequence
  SAMD9 targeting guide sequence portion
uuaauauccucaaauaucuagu

SEQ ID NO: 17810 - RNA, 22 nt, Artificial Sequence
  SAMD9 targeting guide sequence portion
uuacaaauacuuuaguauguau

SEQ ID NO: 17811 - RNA, 22 nt, Artificial Sequence
  SAMD9 targeting guide sequence portion
uuacaagagaaaauuucaaaag

SEQ ID NO: 17812 - RNA, 22 nt, Artificial Sequence
  SAMD9 targeting guide sequence portion
uuacugauuaugcuuuugaaau

SEQ ID NO: 17813 - RNA, 22 nt, Artificial Sequence
  SAMD9 targeting guide sequence portion
uuacugauucuagaucauguca

SEQ ID NO: 17814 - RNA, 22 nt, Artificial Sequence
  SAMD9 targeting guide sequence portion
uuagaaaguaacaauaaagagu

SEQ ID NO: 17815 - RNA, 22 nt, Artificial Sequence
  SAMD9 targeting guide sequence portion
uuagaauuuuuucacuggagga

SEQ ID NO: 17816 - RNA, 22 nt, Artificial Sequence
  SAMD9 targeting guide sequence portion
uuagagauacauacuaaaguau

SEQ ID NO: 17817 - RNA, 22 nt, Artificial Sequence
  SAMD9 targeting guide sequence portion
uuaggcaaucagaaaaauuuga

SEQ ID NO: 17818 - RNA, 22 nt, Artificial Sequence
  SAMD9 targeting guide sequence portion
uuaguauguaucucuaaaaggc

SEQ ID NO: 17819 - RNA, 22 nt, Artificial Sequence
  SAMD9 targeting guide sequence portion
uuaguccugaguuaacaauggc

SEQ ID NO: 17820 - RNA, 22 nt, Artificial Sequence
  SAMD9 targeting guide sequence portion
uuauaagcucacucuuuauugu

SEQ ID NO: 17821 - RNA, 22 nt, Artificial Sequence
  SAMD9 targeting guide sequence portion
uuaugcagaagcaagggaaaau

SEQ ID NO: 17822 - RNA, 22 nt, Artificial Sequence
  SAMD9 targeting guide sequence portion
uuaugcuuuugaaauuuucucu

SEQ ID NO: 17823 - RNA, 22 nt, Artificial Sequence
  SAMD9 targeting guide sequence portion
uuauggaguuaaaauuuuaugc

SEQ ID NO: 17824 - RNA, 22 nt, Artificial Sequence
  SAMD9 targeting guide sequence portion
uuauguuuuuuaaagaguucau

SEQ ID NO: 17825 - RNA, 22 nt, Artificial Sequence
  SAMD9 targeting guide sequence portion
uuauuaggcaaucagaaaaauu

SEQ ID NO: 17826 - RNA, 22 nt, Artificial Sequence
  SAMD9 targeting guide sequence portion
uuauugaagauuccaugguuau

SEQ ID NO: 17827 - RNA, 22 nt, Artificial Sequence
  SAMD9 targeting guide sequence portion
uucaaaagcauaaucaguaaga

SEQ ID NO: 17828 - RNA, 22 nt, Artificial Sequence
  SAMD9 targeting guide sequence portion
uucaaaaucucauuagaauuuu

SEQ ID NO: 17829 - RNA, 22 nt, Artificial Sequence
  SAMD9 targeting guide sequence portion
uucaaauuuuucugauugccua

SEQ ID NO: 17830 - RNA, 22 nt, Artificial Sequence
  SAMD9 targeting guide sequence portion
uucaauaauauaguaccuuaau

SEQ ID NO: 17831 - RNA, 22 nt, Artificial Sequence
  SAMD9 targeting guide sequence portion
uucaccacccccacaccccaaa

SEQ ID NO: 17832 - RNA, 22 nt, Artificial Sequence
  SAMD9 targeting guide sequence portion
uucacuggaggaagauuuuccc

SEQ ID NO: 17833 - RNA, 22 nt, Artificial Sequence
  SAMD9 targeting guide sequence portion
uucagcacacuuuucucccucu

SEQ ID NO: 17834 - RNA, 22 nt, Artificial Sequence
  SAMD9 targeting guide sequence portion
uucaugccuuuuagagauacau

SEQ ID NO: 17835 - RNA, 22 nt, Artificial Sequence
  SAMD9 targeting guide sequence portion
uuccaugguuauguuuuuuaaa

SEQ ID NO: 17836 - RNA, 22 nt, Artificial Sequence
  SAMD9 targeting guide sequence portion
uuccauguauccagcuugcagc

SEQ ID NO: 17837 - RNA, 22 nt, Artificial Sequence
  SAMD9 targeting guide sequence portion
uucccuugcuucugcauaaaau

SEQ ID NO: 17838 - RNA, 22 nt, Artificial Sequence
  SAMD9 targeting guide sequence portion
uucccuuucaccacccccacac

SEQ ID NO: 17839 - RNA, 22 nt, Artificial Sequence
  SAMD9 targeting guide sequence portion
uuccuccagugaaaaaauucua

SEQ ID NO: 17840 - RNA, 22 nt, Artificial Sequence
  SAMD9 targeting guide sequence portion
uucgguucuacuucccuuucac

SEQ ID NO: 17841 - RNA, 22 nt, Artificial Sequence
  SAMD9 targeting guide sequence portion
uucuaaauguuuuacaagagaa

SEQ ID NO: 17842 - RNA, 22 nt, Artificial Sequence
  SAMD9 targeting guide sequence portion
uucuaaugagauuuugaagaca

SEQ ID NO: 17843 - RNA, 22 nt, Artificial Sequence
  SAMD9 targeting guide sequence portion
uucuacuucccuuucaccaccc

SEQ ID NO: 17844 - RNA, 22 nt, Artificial Sequence
  SAMD9 targeting guide sequence portion
uucuagaucaugucauuuauuu

SEQ ID NO: 17845 - RNA, 22 nt, Artificial Sequence
  SAMD9 targeting guide sequence portion
uucucccucuuacugauuaugc

SEQ ID NO: 17846 - RNA, 22 nt, Artificial Sequence
  SAMD9 targeting guide sequence portion
uucucuuguaaaacauuuagaa

SEQ ID NO: 17847 - RNA, 22 nt, Artificial Sequence
  SAMD9 targeting guide sequence portion
uucugauugccuaauaauugau

SEQ ID NO: 17848 - RNA, 22 nt, Artificial Sequence
  SAMD9 targeting guide sequence portion
uucugcauaaaauuuuaacucc

SEQ ID NO: 17849 - RNA, 22 nt, Artificial Sequence
  SAMD9 targeting guide sequence portion
uucugucuucaaaaucucauua

SEQ ID NO: 17850 - RNA, 22 nt, Artificial Sequence
  SAMD9 targeting guide sequence portion
uugaaauuuucucuuguaaaac

SEQ ID NO: 17851 - RNA, 22 nt, Artificial Sequence
  SAMD9 targeting guide sequence portion
uugaacacagacuagauauuug

SEQ ID NO: 17852 - RNA, 22 nt, Artificial Sequence
  SAMD9 targeting guide sequence portion
uugaagacagaaacaaaucaca

SEQ ID NO: 17853 - RNA, 22 nt, Artificial Sequence
  SAMD9 targeting guide sequence portion
uugaagauuccaugguuauguu

SEQ ID NO: 17854 - RNA, 22 nt, Artificial Sequence
  SAMD9 targeting guide sequence portion
uugaggauauuaagguacuaua

SEQ ID NO: 17855 - RNA, 22 nt, Artificial Sequence
  SAMD9 targeting guide sequence portion
uugcagccauuguuaacucagg

SEQ ID NO: 17856 - RNA, 22 nt, Artificial Sequence
  SAMD9 targeting guide sequence portion
uugcuucugcauaaaauuuuaa

SEQ ID NO: 17857 - RNA, 22 nt, Artificial Sequence
  SAMD9 targeting guide sequence portion
uugggguguggggguggugaaa

SEQ ID NO: 17858 - RNA, 22 nt, Artificial Sequence
  SAMD9 targeting guide sequence portion
uuguaaauaaaugacaugaucu

SEQ ID NO: 17859 - RNA, 22 nt, Artificial Sequence
  SAMD9 targeting guide sequence portion
uugucaauuagaaaguaacaau

SEQ ID NO: 17860 - RNA, 22 nt, Artificial Sequence
  SAMD9 targeting guide sequence portion
uuguguuuggggugugggggug

SEQ ID NO: 17861 - RNA, 22 nt, Artificial Sequence
  SAMD9 targeting guide sequence portion
uuguuaacucaggacuaaucuu

SEQ ID NO: 17862 - RNA, 22 nt, Artificial Sequence
  SAMD9 targeting guide sequence portion
uuguuucgguucuacuucccuu

SEQ ID NO: 17863 - RNA, 22 nt, Artificial Sequence
  SAMD9 targeting guide sequence portion
uuguuucugucuucaaaaucuc

SEQ ID NO: 17864 - RNA, 22 nt, Artificial Sequence
  SAMD9 targeting guide sequence portion
uuguuuucuaaauguuuuacaa

SEQ ID NO: 17865 - RNA, 22 nt, Artificial Sequence
  SAMD9 targeting guide sequence portion
uuuaaaaaacauaaccauggaa

SEQ ID NO: 17866 - RNA, 22 nt, Artificial Sequence
  SAMD9 targeting guide sequence portion
uuuaaagaguucaugccuuuua

SEQ ID NO: 17867 - RNA, 22 nt, Artificial Sequence
  SAMD9 targeting guide sequence portion
uuuaacuccauaacuuauaagc

SEQ ID NO: 17868 - RNA, 22 nt, Artificial Sequence
  SAMD9 targeting guide sequence portion
uuuacaaauacuuuaguaugua

SEQ ID NO: 17869 - RNA, 22 nt, Artificial Sequence
  SAMD9 targeting guide sequence portion
uuuacaagagaaaauuucaaaa

SEQ ID NO: 17870 - RNA, 22 nt, Artificial Sequence
  SAMD9 targeting guide sequence portion
uuuagagauacauacuaaagua

SEQ ID NO: 17871 - RNA, 22 nt, Artificial Sequence
  SAMD9 targeting guide sequence portion
uuuaguauguaucucuaaaagg

SEQ ID NO: 17872 - RNA, 22 nt, Artificial Sequence
  SAMD9 targeting guide sequence portion
uuuaugcagaagcaagggaaaa

SEQ ID NO: 17873 - RNA, 22 nt, Artificial Sequence
  SAMD9 targeting guide sequence portion
uuucaaaagcauaaucaguaag

SEQ ID NO: 17874 - RNA, 22 nt, Artificial Sequence
  SAMD9 targeting guide sequence portion
uuucaccacccccacaccccaa

SEQ ID NO: 17875 - RNA, 22 nt, Artificial Sequence
  SAMD9 targeting guide sequence portion
uuucacuggaggaagauuuucc

SEQ ID NO: 17876 - RNA, 22 nt, Artificial Sequence
  SAMD9 targeting guide sequence portion
uuucccuugcuucugcauaaaa

SEQ ID NO: 17877 - RNA, 22 nt, Artificial Sequence
  SAMD9 targeting guide sequence portion
uuucgguucuacuucccuuuca

SEQ ID NO: 17878 - RNA, 22 nt, Artificial Sequence
  SAMD9 targeting guide sequence portion
uuucucccucuuacugauuaug

SEQ ID NO: 17879 - RNA, 22 nt, Artificial Sequence
  SAMD9 targeting guide sequence portion
uuucucuuguaaaacauuuaga

SEQ ID NO: 17880 - RNA, 22 nt, Artificial Sequence
  SAMD9 targeting guide sequence portion
uuucugauugccuaauaauuga

SEQ ID NO: 17881 - RNA, 22 nt, Artificial Sequence
  SAMD9 targeting guide sequence portion
uuucugucuucaaaaucucauu

SEQ ID NO: 17882 - RNA, 22 nt, Artificial Sequence
  SAMD9 targeting guide sequence portion
uuugaacacagacuagauauuu

SEQ ID NO: 17883 - RNA, 22 nt, Artificial Sequence
  SAMD9 targeting guide sequence portion
uuugaagacagaaacaaaucac

SEQ ID NO: 17884 - RNA, 22 nt, Artificial Sequence
  SAMD9 targeting guide sequence portion
uuugaggauauuaagguacuau

SEQ ID NO: 17885 - RNA, 22 nt, Artificial Sequence
  SAMD9 targeting guide sequence portion
uuugggguguggggguggugaa

SEQ ID NO: 17886 - RNA, 22 nt, Artificial Sequence
  SAMD9 targeting guide sequence portion
uuuguaaauaaaugacaugauc

SEQ ID NO: 17887 - RNA, 22 nt, Artificial Sequence
  SAMD9 targeting guide sequence portion
uuugucaauuagaaaguaacaa

SEQ ID NO: 17888 - RNA, 22 nt, Artificial Sequence
  SAMD9 targeting guide sequence portion
uuuguguuuggggugugggggu

SEQ ID NO: 17889 - RNA, 22 nt, Artificial Sequence
  SAMD9 targeting guide sequence portion
uuuguuucugucuucaaaaucu

SEQ ID NO: 17890 - RNA, 22 nt, Artificial Sequence
  SAMD9 targeting guide sequence portion
uuuguuuucuaaauguuuuaca

SEQ ID NO: 17891 - RNA, 22 nt, Artificial Sequence
  SAMD9 targeting guide sequence portion
uuuuaaagaguucaugccuuuu

SEQ ID NO: 17892 - RNA, 22 nt, Artificial Sequence
  SAMD9 targeting guide sequence portion
uuuuaacuccauaacuuauaag

SEQ ID NO: 17893 - RNA, 22 nt, Artificial Sequence
  SAMD9 targeting guide sequence portion
uuuuacaagagaaaauuucaaa

SEQ ID NO: 17894 - RNA, 22 nt, Artificial Sequence
  SAMD9 targeting guide sequence portion
uuuuagagauacauacuaaagu

SEQ ID NO: 17895 - RNA, 22 nt, Artificial Sequence
  SAMD9 targeting guide sequence portion
uuuuaugcagaagcaagggaaa

SEQ ID NO: 17896 - RNA, 22 nt, Artificial Sequence
  SAMD9 targeting guide sequence portion
uuuucacuggaggaagauuuuc

SEQ ID NO: 17897 - RNA, 22 nt, Artificial Sequence
  SAMD9 targeting guide sequence portion
uuuucccuugcuucugcauaaa

SEQ ID NO: 17898 - RNA, 22 nt, Artificial Sequence
  SAMD9 targeting guide sequence portion
uuuucucccucuuacugauuau

SEQ ID NO: 17899 - RNA, 22 nt, Artificial Sequence
  SAMD9 targeting guide sequence portion
uuuucucuuguaaaacauuuag

SEQ ID NO: 17900 - RNA, 22 nt, Artificial Sequence
  SAMD9 targeting guide sequence portion
uuuucugauugccuaauaauug

SEQ ID NO: 17901 - RNA, 22 nt, Artificial Sequence
  SAMD9 targeting guide sequence portion
uuuugaagacagaaacaaauca

SEQ ID NO: 17902 - RNA, 22 nt, Artificial Sequence
  SAMD9 targeting guide sequence portion
uuuuguguuugggguguggggg

SEQ ID NO: 17903 - RNA, 22 nt, Artificial Sequence
  SAMD9 targeting guide sequence portion
uuuuguuuucuaaauguuuuac

SEQ ID NO: 17904 - RNA, 22 nt, Artificial Sequence
  SAMD9 targeting guide sequence portion
uuuuuaaagaguucaugccuuu

SEQ ID NO: 17905 - RNA, 22 nt, Artificial Sequence
  SAMD9 targeting guide sequence portion
uuuuucacuggaggaagauuuu

SEQ ID NO: 17906 - RNA, 22 nt, Artificial Sequence
  SAMD9 targeting guide sequence portion
uuuuucugauugccuaauaauu

SEQ ID NO: 17907 - RNA, 22 nt, Artificial Sequence
  SAMD9 targeting guide sequence portion
uuuuuguuuucuaaauguuuua

SEQ ID NO: 17908 - RNA, 22 nt, Artificial Sequence
  SAMD9 targeting guide sequence portion
uuuuuuaaagaguucaugccuu

SEQ ID NO: 17909 - RNA, 22 nt, Artificial Sequence
  SAMD9 targeting guide sequence portion
uuuuuucacuggaggaagauuu

SEQ ID NO: 17910 - RNA, 20 nt, Artificial Sequence
  SAMD9 targeting guide sequence portion
aaaacaucaggcugaacgcc

SEQ ID NO: 17911 - RNA, 20 nt, Artificial Sequence
  SAMD9 targeting guide sequence portion
aaaauuguauauuauuuaug

SEQ ID NO: 17912 - RNA, 20 nt, Artificial Sequence
  SAMD9 targeting guide sequence portion
aaacaucaggcugaacgcca

SEQ ID NO: 17913 - RNA, 20 nt, Artificial Sequence
  SAMD9 targeting guide sequence portion
aaaugaagguaauuaauaua

SEQ ID NO: 17914 - RNA, 20 nt, Artificial Sequence
  SAMD9 targeting guide sequence portion
aaauuguauauuauuuaugg

SEQ ID NO: 17915 - RNA, 20 nt, Artificial Sequence
  SAMD9 targeting guide sequence portion
aacaucaggcugaacgccau

SEQ ID NO: 17916 - RNA, 20 nt, Artificial Sequence
  SAMD9 targeting guide sequence portion
aagcaggcuugagaggugau

SEQ ID NO: 17917 - RNA, 20 nt, Artificial Sequence
  SAMD9 targeting guide sequence portion
aauauauccaucaccucuca

SEQ ID NO: 17918 - RNA, 20 nt, Artificial Sequence
  SAMD9 targeting guide sequence portion
aaugaagguaauuaauauau

SEQ ID NO: 17919 - RNA, 20 nt, Artificial Sequence
  SAMD9 targeting guide sequence portion
aauuaauauauccaucaccu

SEQ ID NO: 17920 - RNA, 20 nt, Artificial Sequence
  SAMD9 targeting guide sequence portion
aauuaccuucauuuagucau

SEQ ID NO: 17921 - RNA, 20 nt, Artificial Sequence
  SAMD9 targeting guide sequence portion
aauuguauauuauuuauggc

SEQ ID NO: 17922 - RNA, 20 nt, Artificial Sequence
  SAMD9 targeting guide sequence portion
acaagcaggcuugagaggug

SEQ ID NO: 17923 - RNA, 20 nt, Artificial Sequence
  SAMD9 targeting guide sequence portion
acacaagcaggcuugagagg

SEQ ID NO: 17924 - RNA, 20 nt, Artificial Sequence
  SAMD9 targeting guide sequence portion
acacacaagcaggcuugaga

SEQ ID NO: 17925 - RNA, 20 nt, Artificial Sequence
  SAMD9 targeting guide sequence portion
acacacacaagcaggcuuga

SEQ ID NO: 17926 - RNA, 20 nt, Artificial Sequence
  SAMD9 targeting guide sequence portion
acaucaggcugaacgccaua

SEQ ID NO: 17927 - RNA, 20 nt, Artificial Sequence
  SAMD9 targeting guide sequence portion
accucucaagccugcuugug

SEQ ID NO: 17928 - RNA, 20 nt, Artificial Sequence
  SAMD9 targeting guide sequence portion
accuucauuuagucauuuca

SEQ ID NO: 17929 - RNA, 20 nt, Artificial Sequence
  SAMD9 targeting guide sequence portion
acuaaaugaagguaauuaau

SEQ ID NO: 17930 - RNA, 20 nt, Artificial Sequence
  SAMD9 targeting guide sequence portion
acugugaaaugacuaaauga

SEQ ID NO: 17931 - RNA, 20 nt, Artificial Sequence
  SAMD9 targeting guide sequence portion
agaggugauggauauauuaa

SEQ ID NO: 17932 - RNA, 20 nt, Artificial Sequence
  SAMD9 targeting guide sequence portion
agcaggcuugagaggugaug

SEQ ID NO: 17933 - RNA, 20 nt, Artificial Sequence
  SAMD9 targeting guide sequence portion
aggcugaacgccauaaauaa

SEQ ID NO: 17934 - RNA, 20 nt, Artificial Sequence
  SAMD9 targeting guide sequence portion
aggcuugagaggugauggau

SEQ ID NO: 17935 - RNA, 20 nt, Artificial Sequence
  SAMD9 targeting guide sequence portion
agguaauuaauauauccauc

SEQ ID NO: 17936 - RNA, 20 nt, Artificial Sequence
  SAMD9 targeting guide sequence portion
aggugauggauauauuaauu

SEQ ID NO: 17937 - RNA, 20 nt, Artificial Sequence
  SAMD9 targeting guide sequence portion
aguauauaucuauaucaaaa

SEQ ID NO: 17938 - RNA, 20 nt, Artificial Sequence
  SAMD9 targeting guide sequence portion
auacugugaaaugacuaaau

SEQ ID NO: 17939 - RNA, 20 nt, Artificial Sequence
  SAMD9 targeting guide sequence portion
auauacugugaaaugacuaa

SEQ ID NO: 17940 - RNA, 20 nt, Artificial Sequence
  SAMD9 targeting guide sequence portion
auauauccaucaccucucaa

SEQ ID NO: 17941 - RNA, 20 nt, Artificial Sequence
  SAMD9 targeting guide sequence portion
auauaucuauaucaaaacau

SEQ ID NO: 17942 - RNA, 20 nt, Artificial Sequence
  SAMD9 targeting guide sequence portion
auaucaaaacaucaggcuga

SEQ ID NO: 17943 - RNA, 20 nt, Artificial Sequence
  SAMD9 targeting guide sequence portion
auauccaucaccucucaagc

SEQ ID NO: 17944 - RNA, 20 nt, Artificial Sequence
  SAMD9 targeting guide sequence portion
auauuauuuauggcguucag

SEQ ID NO: 17945 - RNA, 20 nt, Artificial Sequence
  SAMD9 targeting guide sequence portion
aucaaaacaucaggcugaac

SEQ ID NO: 17946 - RNA, 20 nt, Artificial Sequence
  SAMD9 targeting guide sequence portion
aucaccucucaagccugcuu

SEQ ID NO: 17947 - RNA, 20 nt, Artificial Sequence
  SAMD9 targeting guide sequence portion
aucaggcugaacgccauaaa

SEQ ID NO: 17948 - RNA, 20 nt, Artificial Sequence
  SAMD9 targeting guide sequence portion
auccaucaccucucaagccu

SEQ ID NO: 17949 - RNA, 20 nt, Artificial Sequence
  SAMD9 targeting guide sequence portion
augaagguaauuaauauauc

SEQ ID NO: 17950 - RNA, 20 nt, Artificial Sequence
  SAMD9 targeting guide sequence portion
auggcguucagccugauguu

SEQ ID NO: 17951 - RNA, 20 nt, Artificial Sequence
  SAMD9 targeting guide sequence portion
auguuuugauauagauauau

SEQ ID NO: 17952 - RNA, 20 nt, Artificial Sequence
  SAMD9 targeting guide sequence portion
auuaauauauccaucaccuc

SEQ ID NO: 17953 - RNA, 20 nt, Artificial Sequence
  SAMD9 targeting guide sequence portion
auuaauuaccuucauuuagu

SEQ ID NO: 17954 - RNA, 20 nt, Artificial Sequence
  SAMD9 targeting guide sequence portion
auuaccuucauuuagucauu

SEQ ID NO: 17955 - RNA, 20 nt, Artificial Sequence
  SAMD9 targeting guide sequence portion
auuauuuauggcguucagcc

SEQ ID NO: 17956 - RNA, 20 nt, Artificial Sequence
  SAMD9 targeting guide sequence portion
auuguauauuauuuauggcg

SEQ ID NO: 17957 - RNA, 20 nt, Artificial Sequence
  SAMD9 targeting guide sequence portion
auuuauggcguucagccuga

SEQ ID NO: 17958 - RNA, 20 nt, Artificial Sequence
  SAMD9 targeting guide sequence portion
caaaacaucaggcugaacgc

SEQ ID NO: 17959 - RNA, 20 nt, Artificial Sequence
  SAMD9 targeting guide sequence portion
caagcaggcuugagagguga

SEQ ID NO: 17960 - RNA, 20 nt, Artificial Sequence
  SAMD9 targeting guide sequence portion
cacaagcaggcuugagaggu

SEQ ID NO: 17961 - RNA, 20 nt, Artificial Sequence
  SAMD9 targeting guide sequence portion
cacacaagcaggcuugagag

SEQ ID NO: 17962 - RNA, 20 nt, Artificial Sequence
  SAMD9 targeting guide sequence portion
cacacacaagcaggcuugag

SEQ ID NO: 17963 - RNA, 20 nt, Artificial Sequence
  SAMD9 targeting guide sequence portion
cacacacacaagcaggcuug

SEQ ID NO: 17964 - RNA, 20 nt, Artificial Sequence
  SAMD9 targeting guide sequence portion
caccucucaagccugcuugu

SEQ ID NO: 17965 - RNA, 20 nt, Artificial Sequence
  SAMD9 targeting guide sequence portion
caggcugaacgccauaaaua

SEQ ID NO: 17966 - RNA, 20 nt, Artificial Sequence
  SAMD9 targeting guide sequence portion
caggcuugagaggugaugga

SEQ ID NO: 17967 - RNA, 20 nt, Artificial Sequence
  SAMD9 targeting guide sequence portion
caucaccucucaagccugcu

SEQ ID NO: 17968 - RNA, 20 nt, Artificial Sequence
  SAMD9 targeting guide sequence portion
caucaggcugaacgccauaa

SEQ ID NO: 17969 - RNA, 20 nt, Artificial Sequence
  SAMD9 targeting guide sequence portion
ccaucaccucucaagccugc

SEQ ID NO: 17970 - RNA, 20 nt, Artificial Sequence
  SAMD9 targeting guide sequence portion
ccucucaagccugcuugugu

SEQ ID NO: 17971 - RNA, 20 nt, Artificial Sequence
  SAMD9 targeting guide sequence portion
ccuucauuuagucauuucac

SEQ ID NO: 17972 - RNA, 20 nt, Artificial Sequence
  SAMD9 targeting guide sequence portion
cuaaaugaagguaauuaaua

SEQ ID NO: 17973 - RNA, 20 nt, Artificial Sequence
  SAMD9 targeting guide sequence portion
cuauaucaaaacaucaggcu

SEQ ID NO: 17974 - RNA, 20 nt, Artificial Sequence
  SAMD9 targeting guide sequence portion
cugaacgccauaaauaauau

SEQ ID NO: 17975 - RNA, 20 nt, Artificial Sequence
  SAMD9 targeting guide sequence portion
cugugaaaugacuaaaugaa

SEQ ID NO: 17976 - RNA, 20 nt, Artificial Sequence
  SAMD9 targeting guide sequence portion
cuucauuuagucauuucaca

SEQ ID NO: 17977 - RNA, 20 nt, Artificial Sequence
  SAMD9 targeting guide sequence portion
cuugagaggugauggauaua

SEQ ID NO: 17978 - RNA, 20 nt, Artificial Sequence
  SAMD9 targeting guide sequence portion
gaaaugacuaaaugaaggua

SEQ ID NO: 17979 - RNA, 20 nt, Artificial Sequence
  SAMD9 targeting guide sequence portion
gaacgccauaaauaauauac

SEQ ID NO: 17980 - RNA, 20 nt, Artificial Sequence
  SAMD9 targeting guide sequence portion
gaagguaauuaauauaucca

SEQ ID NO: 17981 - RNA, 20 nt, Artificial Sequence
  SAMD9 targeting guide sequence portion
gacuaaaugaagguaauuaa

SEQ ID NO: 17982 - RNA, 20 nt, Artificial Sequence
  SAMD9 targeting guide sequence portion
gagaggugauggauauauua

SEQ ID NO: 17983 - RNA, 20 nt, Artificial Sequence
  SAMD9 targeting guide sequence portion
gauauauuaauuaccuucau

SEQ ID NO: 17984 - RNA, 20 nt, Artificial Sequence
  SAMD9 targeting guide sequence portion
gauggauauauuaauuaccu

SEQ ID NO: 17985 - RNA, 20 nt, Artificial Sequence
  SAMD9 targeting guide sequence portion
gcaggcuugagaggugaugg

SEQ ID NO: 17986 - RNA, 20 nt, Artificial Sequence
  SAMD9 targeting guide sequence portion
gcguucagccugauguuuug

SEQ ID NO: 17987 - RNA, 20 nt, Artificial Sequence
  SAMD9 targeting guide sequence portion
gcugaacgccauaaauaaua

SEQ ID NO: 17988 - RNA, 20 nt, Artificial Sequence
  SAMD9 targeting guide sequence portion
gcuugagaggugauggauau

SEQ ID NO: 17989 - RNA, 20 nt, Artificial Sequence
  SAMD9 targeting guide sequence portion
ggauauauuaauuaccuuca

SEQ ID NO: 17990 - RNA, 20 nt, Artificial Sequence
  SAMD9 targeting guide sequence portion
ggcguucagccugauguuuu

SEQ ID NO: 17991 - RNA, 20 nt, Artificial Sequence
  SAMD9 targeting guide sequence portion
ggcugaacgccauaaauaau

SEQ ID NO: 17992 - RNA, 20 nt, Artificial Sequence
  SAMD9 targeting guide sequence portion
ggcuugagaggugauggaua

SEQ ID NO: 17993 - RNA, 20 nt, Artificial Sequence
  SAMD9 targeting guide sequence portion
gguaauuaauauauccauca

SEQ ID NO: 17994 - RNA, 20 nt, Artificial Sequence
  SAMD9 targeting guide sequence portion
ggugauggauauauuaauua

SEQ ID NO: 17995 - RNA, 20 nt, Artificial Sequence
  SAMD9 targeting guide sequence portion
guaauuaauauauccaucac

SEQ ID NO: 17996 - RNA, 20 nt, Artificial Sequence
  SAMD9 targeting guide sequence portion
guauauuauuuauggcguuc

SEQ ID NO: 17997 - RNA, 20 nt, Artificial Sequence
  SAMD9 targeting guide sequence portion
gugaaaugacuaaaugaagg

SEQ ID NO: 17998 - RNA, 20 nt, Artificial Sequence
  SAMD9 targeting guide sequence portion
gugauggauauauuaauuac

SEQ ID NO: 17999 - RNA, 20 nt, Artificial Sequence
  SAMD9 targeting guide sequence portion
uaauauauccaucaccucuc

SEQ ID NO: 18000 - RNA, 20 nt, Artificial Sequence
  SAMD9 targeting guide sequence portion
uaauuaauauauccaucacc

SEQ ID NO: 18001 - RNA, 20 nt, Artificial Sequence
  SAMD9 targeting guide sequence portion
uaauuaccuucauuuaguca

SEQ ID NO: 18002 - RNA, 20 nt, Artificial Sequence
  SAMD9 targeting guide sequence portion
uaccuucauuuagucauuuc

SEQ ID NO: 18003 - RNA, 20 nt, Artificial Sequence
  SAMD9 targeting guide sequence portion
uacugugaaaugacuaaaug

SEQ ID NO: 18004 - RNA, 20 nt, Artificial Sequence
  SAMD9 targeting guide sequence portion
uauacugugaaaugacuaaa

SEQ ID NO: 18005 - RNA, 20 nt, Artificial Sequence
  SAMD9 targeting guide sequence portion
uauauacugugaaaugacua

SEQ ID NO: 18006 - RNA, 20 nt, Artificial Sequence
  SAMD9 targeting guide sequence portion
uauauaucuauaucaaaaca

SEQ ID NO: 18007 - RNA, 20 nt, Artificial Sequence
  SAMD9 targeting guide sequence portion
uauaucaaaacaucaggcug

SEQ ID NO: 18008 - RNA, 20 nt, Artificial Sequence
  SAMD9 targeting guide sequence portion
uauauccaucaccucucaag

SEQ ID NO: 18009 - RNA, 20 nt, Artificial Sequence
  SAMD9 targeting guide sequence portion
uauauuauuuauggcguuca

SEQ ID NO: 18010 - RNA, 20 nt, Artificial Sequence
  SAMD9 targeting guide sequence portion
uaucaaaacaucaggcugaa

SEQ ID NO: 18011 - RNA, 20 nt, Artificial Sequence
  SAMD9 targeting guide sequence portion
uauccaucaccucucaagcc

SEQ ID NO: 18012 - RNA, 20 nt, Artificial Sequence
  SAMD9 targeting guide sequence portion
uauggcguucagccugaugu

SEQ ID NO: 18013 - RNA, 20 nt, Artificial Sequence
  SAMD9 targeting guide sequence portion
uauuauuuauggcguucagc

SEQ ID NO: 18014 - RNA, 20 nt, Artificial Sequence
  SAMD9 targeting guide sequence portion
uauuuauggcguucagccug

SEQ ID NO: 18015 - RNA, 20 nt, Artificial Sequence
  SAMD9 targeting guide sequence portion
ucaaaacaucaggcugaacg

SEQ ID NO: 18016 - RNA, 20 nt, Artificial Sequence
  SAMD9 targeting guide sequence portion
ucacacacacaagcaggcuu

SEQ ID NO: 18017 - RNA, 20 nt, Artificial Sequence
  SAMD9 targeting guide sequence portion
ucaccucucaagccugcuug

SEQ ID NO: 18018 - RNA, 20 nt, Artificial Sequence
  SAMD9 targeting guide sequence portion
ucaggcugaacgccauaaau

SEQ ID NO: 18019 - RNA, 20 nt, Artificial Sequence
  SAMD9 targeting guide sequence portion
uccaucaccucucaagccug

SEQ ID NO: 18020 - RNA, 20 nt, Artificial Sequence
  SAMD9 targeting guide sequence portion
ugaaaugacuaaaugaaggu

SEQ ID NO: 18021 - RNA, 20 nt, Artificial Sequence
  SAMD9 targeting guide sequence portion
ugaacgccauaaauaauaua

SEQ ID NO: 18022 - RNA, 20 nt, Artificial Sequence
  SAMD9 targeting guide sequence portion
ugaagguaauuaauauaucc

SEQ ID NO: 18023 - RNA, 20 nt, Artificial Sequence
  SAMD9 targeting guide sequence portion
ugagaggugauggauauauu

SEQ ID NO: 18024 - RNA, 20 nt, Artificial Sequence
  SAMD9 targeting guide sequence portion
ugauggauauauuaauuacc

SEQ ID NO: 18025 - RNA, 20 nt, Artificial Sequence
  SAMD9 targeting guide sequence portion
uggauauauuaauuaccuuc

SEQ ID NO: 18026 - RNA, 20 nt, Artificial Sequence
  SAMD9 targeting guide sequence portion
uggcguucagccugauguuu

SEQ ID NO: 18027 - RNA, 20 nt, Artificial Sequence
  SAMD9 targeting guide sequence portion
uguauauuauuuauggcguu

SEQ ID NO: 18028 - RNA, 20 nt, Artificial Sequence
  SAMD9 targeting guide sequence portion
ugugaaaugacuaaaugaag

SEQ ID NO: 18029 - RNA, 20 nt, Artificial Sequence
  SAMD9 targeting guide sequence portion
uguuuugauauagauauaua

SEQ ID NO: 18030 - RNA, 20 nt, Artificial Sequence
  SAMD9 targeting guide sequence portion
uuaauauauccaucaccucu

SEQ ID NO: 18031 - RNA, 20 nt, Artificial Sequence
  SAMD9 targeting guide sequence portion
uuaauuaccuucauuuaguc

SEQ ID NO: 18032 - RNA, 20 nt, Artificial Sequence
  SAMD9 targeting guide sequence portion
uuaccuucauuuagucauuu

SEQ ID NO: 18033 - RNA, 20 nt, Artificial Sequence
  SAMD9 targeting guide sequence portion
uuauggcguucagccugaug

SEQ ID NO: 18034 - RNA, 20 nt, Artificial Sequence
  SAMD9 targeting guide sequence portion
uuauuuauggcguucagccu

SEQ ID NO: 18035 - RNA, 20 nt, Artificial Sequence
  SAMD9 targeting guide sequence portion
uucauuuagucauuucacag

SEQ ID NO: 18036 - RNA, 20 nt, Artificial Sequence
  SAMD9 targeting guide sequence portion
uugagaggugauggauauau

SEQ ID NO: 18037 - RNA, 20 nt, Artificial Sequence
  SAMD9 targeting guide sequence portion
uuguauauuauuuauggcgu

SEQ ID NO: 18038 - RNA, 20 nt, Artificial Sequence
  SAMD9 targeting guide sequence portion
uuuauggcguucagccugau

SEQ ID NO: 18039 - RNA, 21 nt, Artificial Sequence
  SAMD9 targeting guide sequence portion
aaaaauuguauauuauuuaug

SEQ ID NO: 18040 - RNA, 21 nt, Artificial Sequence
  SAMD9 targeting guide sequence portion
aaaacaucaggcugaacgcca

SEQ ID NO: 18041 - RNA, 21 nt, Artificial Sequence
  SAMD9 targeting guide sequence portion
aaaauuguauauuauuuaugg

SEQ ID NO: 18042 - RNA, 21 nt, Artificial Sequence
  SAMD9 targeting guide sequence portion
aaacaucaggcugaacgccau

SEQ ID NO: 18043 - RNA, 21 nt, Artificial Sequence
  SAMD9 targeting guide sequence portion
aaaugaagguaauuaauauau

SEQ ID NO: 18044 - RNA, 21 nt, Artificial Sequence
  SAMD9 targeting guide sequence portion
aaauuguauauuauuuauggc

SEQ ID NO: 18045 - RNA, 21 nt, Artificial Sequence
  SAMD9 targeting guide sequence portion
aacaucaggcugaacgccaua

SEQ ID NO: 18046 - RNA, 21 nt, Artificial Sequence
  SAMD9 targeting guide sequence portion
aagcaggcuugagaggugaug

SEQ ID NO: 18047 - RNA, 21 nt, Artificial Sequence
  SAMD9 targeting guide sequence portion
aagguaauuaauauauccauc

SEQ ID NO: 18048 - RNA, 21 nt, Artificial Sequence
  SAMD9 targeting guide sequence portion
aauauauccaucaccucucaa

SEQ ID NO: 18049 - RNA, 21 nt, Artificial Sequence
  SAMD9 targeting guide sequence portion
aaugaagguaauuaauauauc

SEQ ID NO: 18050 - RNA, 21 nt, Artificial Sequence
  SAMD9 targeting guide sequence portion
aauuaauauauccaucaccuc

SEQ ID NO: 18051 - RNA, 21 nt, Artificial Sequence
  SAMD9 targeting guide sequence portion
aauuaccuucauuuagucauu

SEQ ID NO: 18052 - RNA, 21 nt, Artificial Sequence
  SAMD9 targeting guide sequence portion
aauuguauauuauuuauggcg

SEQ ID NO: 18053 - RNA, 21 nt, Artificial Sequence
  SAMD9 targeting guide sequence portion
acaagcaggcuugagagguga

SEQ ID NO: 18054 - RNA, 21 nt, Artificial Sequence
  SAMD9 targeting guide sequence portion
acacaagcaggcuugagaggu

SEQ ID NO: 18055 - RNA, 21 nt, Artificial Sequence
  SAMD9 targeting guide sequence portion
acacacaagcaggcuugagag

SEQ ID NO: 18056 - RNA, 21 nt, Artificial Sequence
  SAMD9 targeting guide sequence portion
acacacacaagcaggcuugag

SEQ ID NO: 18057 - RNA, 21 nt, Artificial Sequence
  SAMD9 targeting guide sequence portion
acaguauauaucuauaucaaa

SEQ ID NO: 18058 - RNA, 21 nt, Artificial Sequence
  SAMD9 targeting guide sequence portion
acaucaggcugaacgccauaa

SEQ ID NO: 18059 - RNA, 21 nt, Artificial Sequence
  SAMD9 targeting guide sequence portion
accucucaagccugcuugugu

SEQ ID NO: 18060 - RNA, 21 nt, Artificial Sequence
  SAMD9 targeting guide sequence portion
accuucauuuagucauuucac

SEQ ID NO: 18061 - RNA, 21 nt, Artificial Sequence
  SAMD9 targeting guide sequence portion
acuaaaugaagguaauuaaua

SEQ ID NO: 18062 - RNA, 21 nt, Artificial Sequence
  SAMD9 targeting guide sequence portion
acugugaaaugacuaaaugaa

SEQ ID NO: 18063 - RNA, 21 nt, Artificial Sequence
  SAMD9 targeting guide sequence portion
agaggugauggauauauuaau

SEQ ID NO: 18064 - RNA, 21 nt, Artificial Sequence
  SAMD9 targeting guide sequence portion
agcaggcuugagaggugaugg

SEQ ID NO: 18065 - RNA, 21 nt, Artificial Sequence
  SAMD9 targeting guide sequence portion
aggcugaacgccauaaauaau

SEQ ID NO: 18066 - RNA, 21 nt, Artificial Sequence
  SAMD9 targeting guide sequence portion
aggcuugagaggugauggaua

SEQ ID NO: 18067 - RNA, 21 nt, Artificial Sequence
  SAMD9 targeting guide sequence portion
agguaauuaauauauccauca

SEQ ID NO: 18068 - RNA, 21 nt, Artificial Sequence
  SAMD9 targeting guide sequence portion
aggugauggauauauuaauua

SEQ ID NO: 18069 - RNA, 21 nt, Artificial Sequence
  SAMD9 targeting guide sequence portion
aguauauaucuauaucaaaac

SEQ ID NO: 18070 - RNA, 21 nt, Artificial Sequence
  SAMD9 targeting guide sequence portion
auacugugaaaugacuaaaug

SEQ ID NO: 18071 - RNA, 21 nt, Artificial Sequence
  SAMD9 targeting guide sequence portion
auauacugugaaaugacuaaa

SEQ ID NO: 18072 - RNA, 21 nt, Artificial Sequence
  SAMD9 targeting guide sequence portion
auauagauauauacugugaaa

SEQ ID NO: 18073 - RNA, 21 nt, Artificial Sequence
  SAMD9 targeting guide sequence portion
auauauccaucaccucucaag

SEQ ID NO: 18074 - RNA, 21 nt, Artificial Sequence
  SAMD9 targeting guide sequence portion
auauaucuauaucaaaacauc

SEQ ID NO: 18075 - RNA, 21 nt, Artificial Sequence
  SAMD9 targeting guide sequence portion
auaucaaaacaucaggcugaa

SEQ ID NO: 18076 - RNA, 21 nt, Artificial Sequence
  SAMD9 targeting guide sequence portion
auauccaucaccucucaagcc

SEQ ID NO: 18077 - RNA, 21 nt, Artificial Sequence
  SAMD9 targeting guide sequence portion
auauuauuuauggcguucagc

SEQ ID NO: 18078 - RNA, 21 nt, Artificial Sequence
  SAMD9 targeting guide sequence portion
aucaaaacaucaggcugaacg

SEQ ID NO: 18079 - RNA, 21 nt, Artificial Sequence
  SAMD9 targeting guide sequence portion
aucaccucucaagccugcuug

SEQ ID NO: 18080 - RNA, 21 nt, Artificial Sequence
  SAMD9 targeting guide sequence portion
aucaggcugaacgccauaaau

SEQ ID NO: 18081 - RNA, 21 nt, Artificial Sequence
  SAMD9 targeting guide sequence portion
auccaucaccucucaagccug

SEQ ID NO: 18082 - RNA, 21 nt, Artificial Sequence
  SAMD9 targeting guide sequence portion
augaagguaauuaauauaucc

SEQ ID NO: 18083 - RNA, 21 nt, Artificial Sequence
  SAMD9 targeting guide sequence portion
auggauauauuaauuaccuuc

SEQ ID NO: 18084 - RNA, 21 nt, Artificial Sequence
  SAMD9 targeting guide sequence portion
auggcguucagccugauguuu

SEQ ID NO: 18085 - RNA, 21 nt, Artificial Sequence
  SAMD9 targeting guide sequence portion
auguuuugauauagauauaua

SEQ ID NO: 18086 - RNA, 21 nt, Artificial Sequence
  SAMD9 targeting guide sequence portion
auuaauauauccaucaccucu

SEQ ID NO: 18087 - RNA, 21 nt, Artificial Sequence
  SAMD9 targeting guide sequence portion
auuaauuaccuucauuuaguc

SEQ ID NO: 18088 - RNA, 21 nt, Artificial Sequence
  SAMD9 targeting guide sequence portion
auuaccuucauuuagucauuu

SEQ ID NO: 18089 - RNA, 21 nt, Artificial Sequence
  SAMD9 targeting guide sequence portion
auuauuuauggcguucagccu

SEQ ID NO: 18090 - RNA, 21 nt, Artificial Sequence
  SAMD9 targeting guide sequence portion
auuguauauuauuuauggcgu

SEQ ID NO: 18091 - RNA, 21 nt, Artificial Sequence
  SAMD9 targeting guide sequence portion
auuuauggcguucagccugau

SEQ ID NO: 18092 - RNA, 21 nt, Artificial Sequence
  SAMD9 targeting guide sequence portion
caaaacaucaggcugaacgcc

SEQ ID NO: 18093 - RNA, 21 nt, Artificial Sequence
  SAMD9 targeting guide sequence portion
caagcaggcuugagaggugau

SEQ ID NO: 18094 - RNA, 21 nt, Artificial Sequence
  SAMD9 targeting guide sequence portion
cacaagcaggcuugagaggug

SEQ ID NO: 18095 - RNA, 21 nt, Artificial Sequence
  SAMD9 targeting guide sequence portion
cacacaagcaggcuugagagg

SEQ ID NO: 18096 - RNA, 21 nt, Artificial Sequence
  SAMD9 targeting guide sequence portion
cacacacaagcaggcuugaga

SEQ ID NO: 18097 - RNA, 21 nt, Artificial Sequence
  SAMD9 targeting guide sequence portion
cacacacacaagcaggcuuga

SEQ ID NO: 18098 - RNA, 21 nt, Artificial Sequence
  SAMD9 targeting guide sequence portion
caccucucaagccugcuugug

SEQ ID NO: 18099 - RNA, 21 nt, Artificial Sequence
  SAMD9 targeting guide sequence portion
caggcugaacgccauaaauaa

SEQ ID NO: 18100 - RNA, 21 nt, Artificial Sequence
  SAMD9 targeting guide sequence portion
caggcuugagaggugauggau

SEQ ID NO: 18101 - RNA, 21 nt, Artificial Sequence
  SAMD9 targeting guide sequence portion
caguauauaucuauaucaaaa

SEQ ID NO: 18102 - RNA, 21 nt, Artificial Sequence
  SAMD9 targeting guide sequence portion
caucaccucucaagccugcuu

SEQ ID NO: 18103 - RNA, 21 nt, Artificial Sequence
  SAMD9 targeting guide sequence portion
caucaggcugaacgccauaaa

SEQ ID NO: 18104 - RNA, 21 nt, Artificial Sequence
  SAMD9 targeting guide sequence portion
ccaucaccucucaagccugcu

SEQ ID NO: 18105 - RNA, 21 nt, Artificial Sequence
  SAMD9 targeting guide sequence portion
ccuucauuuagucauuucaca

SEQ ID NO: 18106 - RNA, 21 nt, Artificial Sequence
  SAMD9 targeting guide sequence portion
cuaaaugaagguaauuaauau

SEQ ID NO: 18107 - RNA, 21 nt, Artificial Sequence
  SAMD9 targeting guide sequence portion
cuauaucaaaacaucaggcug

SEQ ID NO: 18108 - RNA, 21 nt, Artificial Sequence
  SAMD9 targeting guide sequence portion
cugaacgccauaaauaauaua

SEQ ID NO: 18109 - RNA, 21 nt, Artificial Sequence
  SAMD9 targeting guide sequence portion
cugugaaaugacuaaaugaag

SEQ ID NO: 18110 - RNA, 21 nt, Artificial Sequence
  SAMD9 targeting guide sequence portion
cuucauuuagucauuucacag

SEQ ID NO: 18111 - RNA, 21 nt, Artificial Sequence
  SAMD9 targeting guide sequence portion
cuugagaggugauggauauau

SEQ ID NO: 18112 - RNA, 21 nt, Artificial Sequence
  SAMD9 targeting guide sequence portion
gaaaugacuaaaugaagguaa

SEQ ID NO: 18113 - RNA, 21 nt, Artificial Sequence
  SAMD9 targeting guide sequence portion
gaacgccauaaauaauauaca

SEQ ID NO: 18114 - RNA, 21 nt, Artificial Sequence
  SAMD9 targeting guide sequence portion
gaagguaauuaauauauccau

SEQ ID NO: 18115 - RNA, 21 nt, Artificial Sequence
  SAMD9 targeting guide sequence portion
gacuaaaugaagguaauuaau

SEQ ID NO: 18116 - RNA, 21 nt, Artificial Sequence
  SAMD9 targeting guide sequence portion
gagaggugauggauauauuaa

SEQ ID NO: 18117 - RNA, 21 nt, Artificial Sequence
  SAMD9 targeting guide sequence portion
gaggugauggauauauuaauu

SEQ ID NO: 18118 - RNA, 21 nt, Artificial Sequence
  SAMD9 targeting guide sequence portion
gauauauuaauuaccuucauu

SEQ ID NO: 18119 - RNA, 21 nt, Artificial Sequence
  SAMD9 targeting guide sequence portion
gauggauauauuaauuaccuu

SEQ ID NO: 18120 - RNA, 21 nt, Artificial Sequence
  SAMD9 targeting guide sequence portion
gauguuuugauauagauauau

SEQ ID NO: 18121 - RNA, 21 nt, Artificial Sequence
  SAMD9 targeting guide sequence portion
gcaggcuugagaggugaugga

SEQ ID NO: 18122 - RNA, 21 nt, Artificial Sequence
  SAMD9 targeting guide sequence portion
gcugaacgccauaaauaauau

SEQ ID NO: 18123 - RNA, 21 nt, Artificial Sequence
  SAMD9 targeting guide sequence portion
gcuugagaggugauggauaua

SEQ ID NO: 18124 - RNA, 21 nt, Artificial Sequence
  SAMD9 targeting guide sequence portion
ggauauauuaauuaccuucau

SEQ ID NO: 18125 - RNA, 21 nt, Artificial Sequence
  SAMD9 targeting guide sequence portion
ggcguucagccugauguuuug

SEQ ID NO: 18126 - RNA, 21 nt, Artificial Sequence
  SAMD9 targeting guide sequence portion
ggcugaacgccauaaauaaua

SEQ ID NO: 18127 - RNA, 21 nt, Artificial Sequence
  SAMD9 targeting guide sequence portion
ggcuugagaggugauggauau

SEQ ID NO: 18128 - RNA, 21 nt, Artificial Sequence
  SAMD9 targeting guide sequence portion
gguaauuaauauauccaucac

SEQ ID NO: 18129 - RNA, 21 nt, Artificial Sequence
  SAMD9 targeting guide sequence portion
ggugauggauauauuaauuac

SEQ ID NO: 18130 - RNA, 21 nt, Artificial Sequence
  SAMD9 targeting guide sequence portion
guaauuaauauauccaucacc

SEQ ID NO: 18131 - RNA, 21 nt, Artificial Sequence
  SAMD9 targeting guide sequence portion
guauauaucuauaucaaaaca

SEQ ID NO: 18132 - RNA, 21 nt, Artificial Sequence
  SAMD9 targeting guide sequence portion
guauauuauuuauggcguuca

SEQ ID NO: 18133 - RNA, 21 nt, Artificial Sequence
  SAMD9 targeting guide sequence portion
gugaaaugacuaaaugaaggu

SEQ ID NO: 18134 - RNA, 21 nt, Artificial Sequence
  SAMD9 targeting guide sequence portion
gugauggauauauuaauuacc

SEQ ID NO: 18135 - RNA, 21 nt, Artificial Sequence
  SAMD9 targeting guide sequence portion
guuuugauauagauauauacu

SEQ ID NO: 18136 - RNA, 21 nt, Artificial Sequence
  SAMD9 targeting guide sequence portion
uaaaugaagguaauuaauaua

SEQ ID NO: 18137 - RNA, 21 nt, Artificial Sequence
  SAMD9 targeting guide sequence portion
uaauauauccaucaccucuca

SEQ ID NO: 18138 - RNA, 21 nt, Artificial Sequence
  SAMD9 targeting guide sequence portion
uaauuaauauauccaucaccu

SEQ ID NO: 18139 - RNA, 21 nt, Artificial Sequence
  SAMD9 targeting guide sequence portion
uaauuaccuucauuuagucau

SEQ ID NO: 18140 - RNA, 21 nt, Artificial Sequence
  SAMD9 targeting guide sequence portion
uaccuucauuuagucauuuca

SEQ ID NO: 18141 - RNA, 21 nt, Artificial Sequence
  SAMD9 targeting guide sequence portion
uacugugaaaugacuaaauga

SEQ ID NO: 18142 - RNA, 21 nt, Artificial Sequence
  SAMD9 targeting guide sequence portion
uauacugugaaaugacuaaau

SEQ ID NO: 18143 - RNA, 21 nt, Artificial Sequence
  SAMD9 targeting guide sequence portion
uauagauauauacugugaaau

SEQ ID NO: 18144 - RNA, 21 nt, Artificial Sequence
  SAMD9 targeting guide sequence portion
uauauacugugaaaugacuaa

SEQ ID NO: 18145 - RNA, 21 nt, Artificial Sequence
  SAMD9 targeting guide sequence portion
uauauaucuauaucaaaacau

SEQ ID NO: 18146 - RNA, 21 nt, Artificial Sequence
  SAMD9 targeting guide sequence portion
uauaucaaaacaucaggcuga

SEQ ID NO: 18147 - RNA, 21 nt, Artificial Sequence
  SAMD9 targeting guide sequence portion
uauauccaucaccucucaagc

SEQ ID NO: 18148 - RNA, 21 nt, Artificial Sequence
  SAMD9 targeting guide sequence portion
uauaucuauaucaaaacauca

SEQ ID NO: 18149 - RNA, 21 nt, Artificial Sequence
  SAMD9 targeting guide sequence portion
uauauuauuuauggcguucag

SEQ ID NO: 18150 - RNA, 21 nt, Artificial Sequence
  SAMD9 targeting guide sequence portion
uaucaaaacaucaggcugaac

SEQ ID NO: 18151 - RNA, 21 nt, Artificial Sequence
  SAMD9 targeting guide sequence portion
uauccaucaccucucaagccu

SEQ ID NO: 18152 - RNA, 21 nt, Artificial Sequence
  SAMD9 targeting guide sequence portion
uauggcguucagccugauguu

SEQ ID NO: 18153 - RNA, 21 nt, Artificial Sequence
  SAMD9 targeting guide sequence portion
uauuaauuaccuucauuuagu

SEQ ID NO: 18154 - RNA, 21 nt, Artificial Sequence
  SAMD9 targeting guide sequence portion
uauuauuuauggcguucagcc

SEQ ID NO: 18155 - RNA, 21 nt, Artificial Sequence
  SAMD9 targeting guide sequence portion
uauuuauggcguucagccuga

SEQ ID NO: 18156 - RNA, 21 nt, Artificial Sequence
  SAMD9 targeting guide sequence portion
ucaaaacaucaggcugaacgc

SEQ ID NO: 18157 - RNA, 21 nt, Artificial Sequence
  SAMD9 targeting guide sequence portion
ucacacacacaagcaggcuug

SEQ ID NO: 18158 - RNA, 21 nt, Artificial Sequence
  SAMD9 targeting guide sequence portion
ucaccucucaagccugcuugu

SEQ ID NO: 18159 - RNA, 21 nt, Artificial Sequence
  SAMD9 targeting guide sequence portion
ucaggcugaacgccauaaaua

SEQ ID NO: 18160 - RNA, 21 nt, Artificial Sequence
  SAMD9 targeting guide sequence portion
uccaucaccucucaagccugc

SEQ ID NO: 18161 - RNA, 21 nt, Artificial Sequence
  SAMD9 targeting guide sequence portion
ugaaaugacuaaaugaaggua

SEQ ID NO: 18162 - RNA, 21 nt, Artificial Sequence
  SAMD9 targeting guide sequence portion
ugaacgccauaaauaauauac

SEQ ID NO: 18163 - RNA, 21 nt, Artificial Sequence
  SAMD9 targeting guide sequence portion
ugaagguaauuaauauaucca

SEQ ID NO: 18164 - RNA, 21 nt, Artificial Sequence
  SAMD9 targeting guide sequence portion
ugacuaaaugaagguaauuaa

SEQ ID NO: 18165 - RNA, 21 nt, Artificial Sequence
  SAMD9 targeting guide sequence portion
ugagaggugauggauauauua

SEQ ID NO: 18166 - RNA, 21 nt, Artificial Sequence
  SAMD9 targeting guide sequence portion
ugauggauauauuaauuaccu

SEQ ID NO: 18167 - RNA, 21 nt, Artificial Sequence
  SAMD9 targeting guide sequence portion
ugauguuuugauauagauaua

SEQ ID NO: 18168 - RNA, 21 nt, Artificial Sequence
  SAMD9 targeting guide sequence portion
uggauauauuaauuaccuuca

SEQ ID NO: 18169 - RNA, 21 nt, Artificial Sequence
  SAMD9 targeting guide sequence portion
uggcguucagccugauguuuu

SEQ ID NO: 18170 - RNA, 21 nt, Artificial Sequence
  SAMD9 targeting guide sequence portion
uguauauuauuuauggcguuc

SEQ ID NO: 18171 - RNA, 21 nt, Artificial Sequence
  SAMD9 targeting guide sequence portion
ugugaaaugacuaaaugaagg

SEQ ID NO: 18172 - RNA, 21 nt, Artificial Sequence
  SAMD9 targeting guide sequence portion
uguuuugauauagauauauac

SEQ ID NO: 18173 - RNA, 21 nt, Artificial Sequence
  SAMD9 targeting guide sequence portion
uuaauauauccaucaccucuc

SEQ ID NO: 18174 - RNA, 21 nt, Artificial Sequence
  SAMD9 targeting guide sequence portion
uuaauuaccuucauuuaguca

SEQ ID NO: 18175 - RNA, 21 nt, Artificial Sequence
  SAMD9 targeting guide sequence portion
uuaccuucauuuagucauuuc

SEQ ID NO: 18176 - RNA, 21 nt, Artificial Sequence
  SAMD9 targeting guide sequence portion
uuauggcguucagccugaugu

SEQ ID NO: 18177 - RNA, 21 nt, Artificial Sequence
  SAMD9 targeting guide sequence portion
uuauuuauggcguucagccug

SEQ ID NO: 18178 - RNA, 21 nt, Artificial Sequence
  SAMD9 targeting guide sequence portion
uugagaggugauggauauauu

SEQ ID NO: 18179 - RNA, 21 nt, Artificial Sequence
  SAMD9 targeting guide sequence portion
uuguauauuauuuauggcguu

SEQ ID NO: 18180 - RNA, 21 nt, Artificial Sequence
  SAMD9 targeting guide sequence portion
uuuauggcguucagccugaug

SEQ ID NO: 18181 - RNA, 21 nt, Artificial Sequence
  SAMD9 targeting guide sequence portion
uuucacaguauauaucuauau

SEQ ID NO: 18182 - RNA, 21 nt, Artificial Sequence
  SAMD9 targeting guide sequence portion
uuugauauagauauauacugu

SEQ ID NO: 18183 - RNA, 22 nt, Artificial Sequence
  SAMD9 targeting guide sequence portion
aaaaauuguauauuauuuaugg

SEQ ID NO: 18184 - RNA, 22 nt, Artificial Sequence
  SAMD9 targeting guide sequence portion
aaaacaucaggcugaacgccau

SEQ ID NO: 18185 - RNA, 22 nt, Artificial Sequence
  SAMD9 targeting guide sequence portion
aaaauuguauauuauuuauggc

SEQ ID NO: 18186 - RNA, 22 nt, Artificial Sequence
  SAMD9 targeting guide sequence portion
aaacaucaggcugaacgccaua

SEQ ID NO: 18187 - RNA, 22 nt, Artificial Sequence
  SAMD9 targeting guide sequence portion
aaaugaagguaauuaauauauc

SEQ ID NO: 18188 - RNA, 22 nt, Artificial Sequence
  SAMD9 targeting guide sequence portion
aaauuguauauuauuuauggcg

SEQ ID NO: 18189 - RNA, 22 nt, Artificial Sequence
  SAMD9 targeting guide sequence portion
aacaucaggcugaacgccauaa

SEQ ID NO: 18190 - RNA, 22 nt, Artificial Sequence
  SAMD9 targeting guide sequence portion
aagcaggcuugagaggugaugg

SEQ ID NO: 18191 - RNA, 22 nt, Artificial Sequence
  SAMD9 targeting guide sequence portion
aagguaauuaauauauccauca

SEQ ID NO: 18192 - RNA, 22 nt, Artificial Sequence
  SAMD9 targeting guide sequence portion
aauauauccaucaccucucaag

SEQ ID NO: 18193 - RNA, 22 nt, Artificial Sequence
  SAMD9 targeting guide sequence portion
aaugaagguaauuaauauaucc

SEQ ID NO: 18194 - RNA, 22 nt, Artificial Sequence
  SAMD9 targeting guide sequence portion
aauuaauauauccaucaccucu

SEQ ID NO: 18195 - RNA, 22 nt, Artificial Sequence
  SAMD9 targeting guide sequence portion
aauuaccuucauuuagucauuu

SEQ ID NO: 18196 - RNA, 22 nt, Artificial Sequence
  SAMD9 targeting guide sequence portion
aauuguauauuauuuauggcgu

SEQ ID NO: 18197 - RNA, 22 nt, Artificial Sequence
  SAMD9 targeting guide sequence portion
acaagcaggcuugagaggugau

SEQ ID NO: 18198 - RNA, 22 nt, Artificial Sequence
  SAMD9 targeting guide sequence portion
acacaagcaggcuugagaggug

SEQ ID NO: 18199 - RNA, 22 nt, Artificial Sequence
  SAMD9 targeting guide sequence portion
acacacaagcaggcuugagagg

SEQ ID NO: 18200 - RNA, 22 nt, Artificial Sequence
  SAMD9 targeting guide sequence portion
acacacacaagcaggcuugaga

SEQ ID NO: 18201 - RNA, 22 nt, Artificial Sequence
  SAMD9 targeting guide sequence portion
acaguauauaucuauaucaaaa

SEQ ID NO: 18202 - RNA, 22 nt, Artificial Sequence
  SAMD9 targeting guide sequence portion
acaucaggcugaacgccauaaa

SEQ ID NO: 18203 - RNA, 22 nt, Artificial Sequence
  SAMD9 targeting guide sequence portion
accuucauuuagucauuucaca

SEQ ID NO: 18204 - RNA, 22 nt, Artificial Sequence
  SAMD9 targeting guide sequence portion
acuaaaugaagguaauuaauau

SEQ ID NO: 18205 - RNA, 22 nt, Artificial Sequence
  SAMD9 targeting guide sequence portion
acugugaaaugacuaaaugaag

SEQ ID NO: 18206 - RNA, 22 nt, Artificial Sequence
  SAMD9 targeting guide sequence portion
agaggugauggauauauuaauu

SEQ ID NO: 18207 - RNA, 22 nt, Artificial Sequence
  SAMD9 targeting guide sequence portion
agcaggcuugagaggugaugga

SEQ ID NO: 18208 - RNA, 22 nt, Artificial Sequence
  SAMD9 targeting guide sequence portion
aggcugaacgccauaaauaaua

SEQ ID NO: 18209 - RNA, 22 nt, Artificial Sequence
  SAMD9 targeting guide sequence portion
aggcuugagaggugauggauau

SEQ ID NO: 18210 - RNA, 22 nt, Artificial Sequence
  SAMD9 targeting guide sequence portion
agguaauuaauauauccaucac

SEQ ID NO: 18211 - RNA, 22 nt, Artificial Sequence
  SAMD9 targeting guide sequence portion
aggugauggauauauuaauuac

SEQ ID NO: 18212 - RNA, 22 nt, Artificial Sequence
  SAMD9 targeting guide sequence portion
aguauauaucuauaucaaaaca

SEQ ID NO: 18213 - RNA, 22 nt, Artificial Sequence
  SAMD9 targeting guide sequence portion
auacugugaaaugacuaaauga

SEQ ID NO: 18214 - RNA, 22 nt, Artificial Sequence
  SAMD9 targeting guide sequence portion
auauacugugaaaugacuaaau

SEQ ID NO: 18215 - RNA, 22 nt, Artificial Sequence
  SAMD9 targeting guide sequence portion
auauagauauauacugugaaau

SEQ ID NO: 18216 - RNA, 22 nt, Artificial Sequence
  SAMD9 targeting guide sequence portion
auauauccaucaccucucaagc

SEQ ID NO: 18217 - RNA, 22 nt, Artificial Sequence
  SAMD9 targeting guide sequence portion
auauaucuauaucaaaacauca

SEQ ID NO: 18218 - RNA, 22 nt, Artificial Sequence
  SAMD9 targeting guide sequence portion
auaucaaaacaucaggcugaac

SEQ ID NO: 18219 - RNA, 22 nt, Artificial Sequence
  SAMD9 targeting guide sequence portion
auauccaucaccucucaagccu

SEQ ID NO: 18220 - RNA, 22 nt, Artificial Sequence
  SAMD9 targeting guide sequence portion
auauuaauuaccuucauuuagu

SEQ ID NO: 18221 - RNA, 22 nt, Artificial Sequence
  SAMD9 targeting guide sequence portion
auauuauuuauggcguucagcc

SEQ ID NO: 18222 - RNA, 22 nt, Artificial Sequence
  SAMD9 targeting guide sequence portion
aucaaaacaucaggcugaacgc

SEQ ID NO: 18223 - RNA, 22 nt, Artificial Sequence
  SAMD9 targeting guide sequence portion
aucaccucucaagccugcuugu

SEQ ID NO: 18224 - RNA, 22 nt, Artificial Sequence
  SAMD9 targeting guide sequence portion
aucaggcugaacgccauaaaua

SEQ ID NO: 18225 - RNA, 22 nt, Artificial Sequence
  SAMD9 targeting guide sequence portion
auccaucaccucucaagccugc

SEQ ID NO: 18226 - RNA, 22 nt, Artificial Sequence
  SAMD9 targeting guide sequence portion
augaagguaauuaauauaucca

SEQ ID NO: 18227 - RNA, 22 nt, Artificial Sequence
  SAMD9 targeting guide sequence portion
augacuaaaugaagguaauuaa

SEQ ID NO: 18228 - RNA, 22 nt, Artificial Sequence
  SAMD9 targeting guide sequence portion
auggauauauuaauuaccuuca

SEQ ID NO: 18229 - RNA, 22 nt, Artificial Sequence
  SAMD9 targeting guide sequence portion
auggcguucagccugauguuuu

SEQ ID NO: 18230 - RNA, 22 nt, Artificial Sequence
  SAMD9 targeting guide sequence portion
auguuuugauauagauauauac

SEQ ID NO: 18231 - RNA, 22 nt, Artificial Sequence
  SAMD9 targeting guide sequence portion
auuaauauauccaucaccucuc

SEQ ID NO: 18232 - RNA, 22 nt, Artificial Sequence
  SAMD9 targeting guide sequence portion
auuaauuaccuucauuuaguca

SEQ ID NO: 18233 - RNA, 22 nt, Artificial Sequence
  SAMD9 targeting guide sequence portion
auuaccuucauuuagucauuuc

SEQ ID NO: 18234 - RNA, 22 nt, Artificial Sequence
  SAMD9 targeting guide sequence portion
auuauuuauggcguucagccug

SEQ ID NO: 18235 - RNA, 22 nt, Artificial Sequence
  SAMD9 targeting guide sequence portion
auuguauauuauuuauggcguu

SEQ ID NO: 18236 - RNA, 22 nt, Artificial Sequence
  SAMD9 targeting guide sequence portion
auuuauggcguucagccugaug

SEQ ID NO: 18237 - RNA, 22 nt, Artificial Sequence
  SAMD9 targeting guide sequence portion
auuucacaguauauaucuauau

SEQ ID NO: 18238 - RNA, 22 nt, Artificial Sequence
  SAMD9 targeting guide sequence portion
caaaacaucaggcugaacgcca

SEQ ID NO: 18239 - RNA, 22 nt, Artificial Sequence
  SAMD9 targeting guide sequence portion
caagcaggcuugagaggugaug

SEQ ID NO: 18240 - RNA, 22 nt, Artificial Sequence
  SAMD9 targeting guide sequence portion
cacaagcaggcuugagagguga

SEQ ID NO: 18241 - RNA, 22 nt, Artificial Sequence
  SAMD9 targeting guide sequence portion
cacacaagcaggcuugagaggu

SEQ ID NO: 18242 - RNA, 22 nt, Artificial Sequence
  SAMD9 targeting guide sequence portion
cacacacaagcaggcuugagag

SEQ ID NO: 18243 - RNA, 22 nt, Artificial Sequence
  SAMD9 targeting guide sequence portion
cacacacacaagcaggcuugag

SEQ ID NO: 18244 - RNA, 22 nt, Artificial Sequence
  SAMD9 targeting guide sequence portion
caccucucaagccugcuugugu

SEQ ID NO: 18245 - RNA, 22 nt, Artificial Sequence
  SAMD9 targeting guide sequence portion
caggcugaacgccauaaauaau

SEQ ID NO: 18246 - RNA, 22 nt, Artificial Sequence
  SAMD9 targeting guide sequence portion
caggcuugagaggugauggaua

SEQ ID NO: 18247 - RNA, 22 nt, Artificial Sequence
  SAMD9 targeting guide sequence portion
caucaccucucaagccugcuug

SEQ ID NO: 18248 - RNA, 22 nt, Artificial Sequence
  SAMD9 targeting guide sequence portion
caucaggcugaacgccauaaau

SEQ ID NO: 18249 - RNA, 22 nt, Artificial Sequence
  SAMD9 targeting guide sequence portion
ccaucaccucucaagccugcuu

SEQ ID NO: 18250 - RNA, 22 nt, Artificial Sequence
  SAMD9 targeting guide sequence portion
ccuucauuuagucauuucacag

SEQ ID NO: 18251 - RNA, 22 nt, Artificial Sequence
  SAMD9 targeting guide sequence portion
cuaaaugaagguaauuaauaua

SEQ ID NO: 18252 - RNA, 22 nt, Artificial Sequence
  SAMD9 targeting guide sequence portion
cuauaucaaaacaucaggcuga

SEQ ID NO: 18253 - RNA, 22 nt, Artificial Sequence
  SAMD9 targeting guide sequence portion
cugaacgccauaaauaauauac

SEQ ID NO: 18254 - RNA, 22 nt, Artificial Sequence
  SAMD9 targeting guide sequence portion
cugugaaaugacuaaaugaagg

SEQ ID NO: 18255 - RNA, 22 nt, Artificial Sequence
  SAMD9 targeting guide sequence portion
cuugagaggugauggauauauu

SEQ ID NO: 18256 - RNA, 22 nt, Artificial Sequence
  SAMD9 targeting guide sequence portion
gaaaugacuaaaugaagguaau

SEQ ID NO: 18257 - RNA, 22 nt, Artificial Sequence
  SAMD9 targeting guide sequence portion
gaacgccauaaauaauauacaa

SEQ ID NO: 18258 - RNA, 22 nt, Artificial Sequence
  SAMD9 targeting guide sequence portion
gaagguaauuaauauauccauc

SEQ ID NO: 18259 - RNA, 22 nt, Artificial Sequence
  SAMD9 targeting guide sequence portion
gacuaaaugaagguaauuaaua

SEQ ID NO: 18260 - RNA, 22 nt, Artificial Sequence
  SAMD9 targeting guide sequence portion
gagaggugauggauauauuaau

SEQ ID NO: 18261 - RNA, 22 nt, Artificial Sequence
  SAMD9 targeting guide sequence portion
gaggugauggauauauuaauua

SEQ ID NO: 18262 - RNA, 22 nt, Artificial Sequence
  SAMD9 targeting guide sequence portion
gauauauuaauuaccuucauuu

SEQ ID NO: 18263 - RNA, 22 nt, Artificial Sequence
  SAMD9 targeting guide sequence portion
gauggauauauuaauuaccuuc

SEQ ID NO: 18264 - RNA, 22 nt, Artificial Sequence
  SAMD9 targeting guide sequence portion
gauguuuugauauagauauaua

SEQ ID NO: 18265 - RNA, 22 nt, Artificial Sequence
  SAMD9 targeting guide sequence portion
gcaggcuugagaggugauggau

SEQ ID NO: 18266 - RNA, 22 nt, Artificial Sequence
  SAMD9 targeting guide sequence portion
gcugaacgccauaaauaauaua

SEQ ID NO: 18267 - RNA, 22 nt, Artificial Sequence
  SAMD9 targeting guide sequence portion
gcuugagaggugauggauauau

SEQ ID NO: 18268 - RNA, 22 nt, Artificial Sequence
  SAMD9 targeting guide sequence portion
ggauauauuaauuaccuucauu

SEQ ID NO: 18269 - RNA, 22 nt, Artificial Sequence
  SAMD9 targeting guide sequence portion
ggcugaacgccauaaauaauau

SEQ ID NO: 18270 - RNA, 22 nt, Artificial Sequence
  SAMD9 targeting guide sequence portion
ggcuugagaggugauggauaua

SEQ ID NO: 18271 - RNA, 22 nt, Artificial Sequence
  SAMD9 targeting guide sequence portion
gguaauuaauauauccaucacc

SEQ ID NO: 18272 - RNA, 22 nt, Artificial Sequence
  SAMD9 targeting guide sequence portion
ggugauggauauauuaauuacc

SEQ ID NO: 18273 - RNA, 22 nt, Artificial Sequence
  SAMD9 targeting guide sequence portion
guaauuaauauauccaucaccu

SEQ ID NO: 18274 - RNA, 22 nt, Artificial Sequence
  SAMD9 targeting guide sequence portion
guauauaucuauaucaaaacau

SEQ ID NO: 18275 - RNA, 22 nt, Artificial Sequence
  SAMD9 targeting guide sequence portion
guauauuauuuauggcguucag

SEQ ID NO: 18276 - RNA, 22 nt, Artificial Sequence
  SAMD9 targeting guide sequence portion
gugaaaugacuaaaugaaggua

SEQ ID NO: 18277 - RNA, 22 nt, Artificial Sequence
  SAMD9 targeting guide sequence portion
gugauggauauauuaauuaccu

SEQ ID NO: 18278 - RNA, 22 nt, Artificial Sequence
  SAMD9 targeting guide sequence portion
uaaaaauuguauauuauuuaug

SEQ ID NO: 18279 - RNA, 22 nt, Artificial Sequence
  SAMD9 targeting guide sequence portion
uaaaugaagguaauuaauauau

SEQ ID NO: 18280 - RNA, 22 nt, Artificial Sequence
  SAMD9 targeting guide sequence portion
uaauauauccaucaccucucaa

SEQ ID NO: 18281 - RNA, 22 nt, Artificial Sequence
  SAMD9 targeting guide sequence portion
uaauuaauauauccaucaccuc

SEQ ID NO: 18282 - RNA, 22 nt, Artificial Sequence
  SAMD9 targeting guide sequence portion
uaauuaccuucauuuagucauu

SEQ ID NO: 18283 - RNA, 22 nt, Artificial Sequence
  SAMD9 targeting guide sequence portion
uaccuucauuuagucauuucac

SEQ ID NO: 18284 - RNA, 22 nt, Artificial Sequence
  SAMD9 targeting guide sequence portion
uacugugaaaugacuaaaugaa

SEQ ID NO: 18285 - RNA, 22 nt, Artificial Sequence
  SAMD9 targeting guide sequence portion
uauacugugaaaugacuaaaug

SEQ ID NO: 18286 - RNA, 22 nt, Artificial Sequence
  SAMD9 targeting guide sequence portion
uauauacugugaaaugacuaaa

SEQ ID NO: 18287 - RNA, 22 nt, Artificial Sequence
  SAMD9 targeting guide sequence portion
uauauaucuauaucaaaacauc

SEQ ID NO: 18288 - RNA, 22 nt, Artificial Sequence
  SAMD9 targeting guide sequence portion
uauaucaaaacaucaggcugaa

SEQ ID NO: 18289 - RNA, 22 nt, Artificial Sequence
  SAMD9 targeting guide sequence portion
uauauccaucaccucucaagcc

SEQ ID NO: 18290 - RNA, 22 nt, Artificial Sequence
  SAMD9 targeting guide sequence portion
uauauuauuuauggcguucagc

SEQ ID NO: 18291 - RNA, 22 nt, Artificial Sequence
  SAMD9 targeting guide sequence portion
uaucaaaacaucaggcugaacg

SEQ ID NO: 18292 - RNA, 22 nt, Artificial Sequence
  SAMD9 targeting guide sequence portion
uauccaucaccucucaagccug

SEQ ID NO: 18293 - RNA, 22 nt, Artificial Sequence
  SAMD9 targeting guide sequence portion
uauggcguucagccugauguuu

SEQ ID NO: 18294 - RNA, 22 nt, Artificial Sequence
  SAMD9 targeting guide sequence portion
uauuaauuaccuucauuuaguc

SEQ ID NO: 18295 - RNA, 22 nt, Artificial Sequence
  SAMD9 targeting guide sequence portion
uauuauuuauggcguucagccu

SEQ ID NO: 18296 - RNA, 22 nt, Artificial Sequence
  SAMD9 targeting guide sequence portion
uauuuauggcguucagccugau

SEQ ID NO: 18297 - RNA, 22 nt, Artificial Sequence
  SAMD9 targeting guide sequence portion
ucaaaacaucaggcugaacgcc

SEQ ID NO: 18298 - RNA, 22 nt, Artificial Sequence
  SAMD9 targeting guide sequence portion
ucacacacacaagcaggcuuga

SEQ ID NO: 18299 - RNA, 22 nt, Artificial Sequence
  SAMD9 targeting guide sequence portion
ucaccucucaagccugcuugug

SEQ ID NO: 18300 - RNA, 22 nt, Artificial Sequence
  SAMD9 targeting guide sequence portion
ucaggcugaacgccauaaauaa

SEQ ID NO: 18301 - RNA, 22 nt, Artificial Sequence
  SAMD9 targeting guide sequence portion
uccaucaccucucaagccugcu

SEQ ID NO: 18302 - RNA, 22 nt, Artificial Sequence
  SAMD9 targeting guide sequence portion
ugaaaugacuaaaugaagguaa

SEQ ID NO: 18303 - RNA, 22 nt, Artificial Sequence
  SAMD9 targeting guide sequence portion
ugaacgccauaaauaauauaca

SEQ ID NO: 18304 - RNA, 22 nt, Artificial Sequence
  SAMD9 targeting guide sequence portion
ugaagguaauuaauauauccau

SEQ ID NO: 18305 - RNA, 22 nt, Artificial Sequence
  SAMD9 targeting guide sequence portion
ugacuaaaugaagguaauuaau

SEQ ID NO: 18306 - RNA, 22 nt, Artificial Sequence
  SAMD9 targeting guide sequence portion
ugagaggugauggauauauuaa

SEQ ID NO: 18307 - RNA, 22 nt, Artificial Sequence
  SAMD9 targeting guide sequence portion
ugauggauauauuaauuaccuu

SEQ ID NO: 18308 - RNA, 22 nt, Artificial Sequence
  SAMD9 targeting guide sequence portion
ugauguuuugauauagauauau

SEQ ID NO: 18309 - RNA, 22 nt, Artificial Sequence
  SAMD9 targeting guide sequence portion
uggauauauuaauuaccuucau

SEQ ID NO: 18310 - RNA, 22 nt, Artificial Sequence
  SAMD9 targeting guide sequence portion
uggcguucagccugauguuuug

SEQ ID NO: 18311 - RNA, 22 nt, Artificial Sequence
  SAMD9 targeting guide sequence portion
uguauauuauuuauggcguuca

SEQ ID NO: 18312 - RNA, 22 nt, Artificial Sequence
  SAMD9 targeting guide sequence portion
ugugaaaugacuaaaugaaggu

SEQ ID NO: 18313 - RNA, 22 nt, Artificial Sequence
  SAMD9 targeting guide sequence portion
uguuuugauauagauauauacu

SEQ ID NO: 18314 - RNA, 22 nt, Artificial Sequence
  SAMD9 targeting guide sequence portion
uuaauauauccaucaccucuca

SEQ ID NO: 18315 - RNA, 22 nt, Artificial Sequence
  SAMD9 targeting guide sequence portion
uuaauuaccuucauuuagucau

SEQ ID NO: 18316 - RNA, 22 nt, Artificial Sequence
  SAMD9 targeting guide sequence portion
uuaccuucauuuagucauuuca

SEQ ID NO: 18317 - RNA, 22 nt, Artificial Sequence
  SAMD9 targeting guide sequence portion
uuauggcguucagccugauguu

SEQ ID NO: 18318 - RNA, 22 nt, Artificial Sequence
  SAMD9 targeting guide sequence portion
uuauuuauggcguucagccuga

SEQ ID NO: 18319 - RNA, 22 nt, Artificial Sequence
  SAMD9 targeting guide sequence portion
uugagaggugauggauauauua

SEQ ID NO: 18320 - RNA, 22 nt, Artificial Sequence
  SAMD9 targeting guide sequence portion
uuguauauuauuuauggcguuc

SEQ ID NO: 18321 - RNA, 22 nt, Artificial Sequence
  SAMD9 targeting guide sequence portion
uuuauggcguucagccugaugu

SEQ ID NO: 18322 - RNA, 22 nt, Artificial Sequence
  SAMD9 targeting guide sequence portion
uuuugauauagauauauacugu

SEQ ID NO: 18323 - RNA, 20 nt, Artificial Sequence
  SAMD9 targeting guide sequence portion
aaaaaagaaggauauuugaa

SEQ ID NO: 18324 - RNA, 20 nt, Artificial Sequence
  SAMD9 targeting guide sequence portion
aaaaagaaggauauuugaaa

SEQ ID NO: 18325 - RNA, 20 nt, Artificial Sequence
  SAMD9 targeting guide sequence portion
aaaaagcucaaaaggauaug

SEQ ID NO: 18326 - RNA, 20 nt, Artificial Sequence
  SAMD9 targeting guide sequence portion
aaaagaaggauauuugaaac

SEQ ID NO: 18327 - RNA, 20 nt, Artificial Sequence
  SAMD9 targeting guide sequence portion
aaaagcucaaaaggauaugc

SEQ ID NO: 18328 - RNA, 20 nt, Artificial Sequence
  SAMD9 targeting guide sequence portion
aaaaggauaugccaaugaau

SEQ ID NO: 18329 - RNA, 20 nt, Artificial Sequence
  SAMD9 targeting guide sequence portion
aaaaguguguucauguguuu

SEQ ID NO: 18330 - RNA, 20 nt, Artificial Sequence
  SAMD9 targeting guide sequence portion
aaaauuuacuuagugaauga

SEQ ID NO: 18331 - RNA, 20 nt, Artificial Sequence
  SAMD9 targeting guide sequence portion
aaacacacauuauagcaaac

SEQ ID NO: 18332 - RNA, 20 nt, Artificial Sequence
  SAMD9 targeting guide sequence portion
aaacacaugaacacacuuuu

SEQ ID NO: 18333 - RNA, 20 nt, Artificial Sequence
  SAMD9 targeting guide sequence portion
aaacuaaguacagaagcaag

SEQ ID NO: 18334 - RNA, 20 nt, Artificial Sequence
  SAMD9 targeting guide sequence portion
aaacuaucucuauauauacu

SEQ ID NO: 18335 - RNA, 20 nt, Artificial Sequence
  SAMD9 targeting guide sequence portion
aaacuggcaauagucacauu

SEQ ID NO: 18336 - RNA, 20 nt, Artificial Sequence
  SAMD9 targeting guide sequence portion
aaacuugcuucuguacuuag

SEQ ID NO: 18337 - RNA, 20 nt, Artificial Sequence
  SAMD9 targeting guide sequence portion
aaagaaggauauuugaaacu

SEQ ID NO: 18338 - RNA, 20 nt, Artificial Sequence
  SAMD9 targeting guide sequence portion
aaagaauaccaaauacaaac

SEQ ID NO: 18339 - RNA, 20 nt, Artificial Sequence
  SAMD9 targeting guide sequence portion
aaagcucaaaaggauaugcc

SEQ ID NO: 18340 - RNA, 20 nt, Artificial Sequence
  SAMD9 targeting guide sequence portion
aaaggauaugccaaugaauu

SEQ ID NO: 18341 - RNA, 20 nt, Artificial Sequence
  SAMD9 targeting guide sequence portion
aaaguaaauagagcauauga

SEQ ID NO: 18342 - RNA, 20 nt, Artificial Sequence
  SAMD9 targeting guide sequence portion
aaaguguguucauguguuug

SEQ ID NO: 18343 - RNA, 20 nt, Artificial Sequence
  SAMD9 targeting guide sequence portion
aaauaauacagcaaacacac

SEQ ID NO: 18344 - RNA, 20 nt, Artificial Sequence
  SAMD9 targeting guide sequence portion
aaauacaaacacaugaacac

SEQ ID NO: 18345 - RNA, 20 nt, Artificial Sequence
  SAMD9 targeting guide sequence portion
aaauagagcauaugaguauu

SEQ ID NO: 18346 - RNA, 20 nt, Artificial Sequence
  SAMD9 targeting guide sequence portion
aaauuguggcauacuauaca

SEQ ID NO: 18347 - RNA, 20 nt, Artificial Sequence
  SAMD9 targeting guide sequence portion
aaauuuaaaaagcucaaaag

SEQ ID NO: 18348 - RNA, 20 nt, Artificial Sequence
  SAMD9 targeting guide sequence portion
aaauuuacuuagugaaugaa

SEQ ID NO: 18349 - RNA, 20 nt, Artificial Sequence
  SAMD9 targeting guide sequence portion
aaauuuugggaaugcuucca

SEQ ID NO: 18350 - RNA, 20 nt, Artificial Sequence
  SAMD9 targeting guide sequence portion
aacacacauuauagcaaaca

SEQ ID NO: 18351 - RNA, 20 nt, Artificial Sequence
  SAMD9 targeting guide sequence portion
aacacacuuuucccacauaa

SEQ ID NO: 18352 - RNA, 20 nt, Artificial Sequence
  SAMD9 targeting guide sequence portion
aacacaugaacacacuuuuc

SEQ ID NO: 18353 - RNA, 20 nt, Artificial Sequence
  SAMD9 targeting guide sequence portion
aacguucaauucugcuauag

SEQ ID NO: 18354 - RNA, 20 nt, Artificial Sequence
  SAMD9 targeting guide sequence portion
aacguucuuaaauaauacag

SEQ ID NO: 18355 - RNA, 20 nt, Artificial Sequence
  SAMD9 targeting guide sequence portion
aacuaaguacagaagcaagu

SEQ ID NO: 18356 - RNA, 20 nt, Artificial Sequence
  SAMD9 targeting guide sequence portion
aacuaucucuauauauacug

SEQ ID NO: 18357 - RNA, 20 nt, Artificial Sequence
  SAMD9 targeting guide sequence portion
aacuaugcuuaauacucaua

SEQ ID NO: 18358 - RNA, 20 nt, Artificial Sequence
  SAMD9 targeting guide sequence portion
aacuggcaauagucacauuc

SEQ ID NO: 18359 - RNA, 20 nt, Artificial Sequence
  SAMD9 targeting guide sequence portion
aacuugcuucuguacuuagu

SEQ ID NO: 18360 - RNA, 20 nt, Artificial Sequence
  SAMD9 targeting guide sequence portion
aagaaacuggcaauagucac

SEQ ID NO: 18361 - RNA, 20 nt, Artificial Sequence
  SAMD9 targeting guide sequence portion
aagaacguucaauucugcua

SEQ ID NO: 18362 - RNA, 20 nt, Artificial Sequence
  SAMD9 targeting guide sequence portion
aagaaggauauuugaaacua

SEQ ID NO: 18363 - RNA, 20 nt, Artificial Sequence
  SAMD9 targeting guide sequence portion
aagaauaccaaauacaaaca

SEQ ID NO: 18364 - RNA, 20 nt, Artificial Sequence
  SAMD9 targeting guide sequence portion
aagagaaaaaagaaggauau

SEQ ID NO: 18365 - RNA, 20 nt, Artificial Sequence
  SAMD9 targeting guide sequence portion
aagagaauuauguauaguau

SEQ ID NO: 18366 - RNA, 20 nt, Artificial Sequence
  SAMD9 targeting guide sequence portion
aagagauaauucauuggcau

SEQ ID NO: 18367 - RNA, 20 nt, Artificial Sequence
  SAMD9 targeting guide sequence portion
aagcaagagaauuauguaua

SEQ ID NO: 18368 - RNA, 20 nt, Artificial Sequence
  SAMD9 targeting guide sequence portion
aagcaaguuugugagauaca

SEQ ID NO: 18369 - RNA, 20 nt, Artificial Sequence
  SAMD9 targeting guide sequence portion
aagcauucccaaaauuuacu

SEQ ID NO: 18370 - RNA, 20 nt, Artificial Sequence
  SAMD9 targeting guide sequence portion
aagcucaaaaggauaugcca

SEQ ID NO: 18371 - RNA, 20 nt, Artificial Sequence
  SAMD9 targeting guide sequence portion
aaggauaaacuaucucuaua

SEQ ID NO: 18372 - RNA, 20 nt, Artificial Sequence
  SAMD9 targeting guide sequence portion
aaggauaugccaaugaauua

SEQ ID NO: 18373 - RNA, 20 nt, Artificial Sequence
  SAMD9 targeting guide sequence portion
aaggauauuugaaacuaagu

SEQ ID NO: 18374 - RNA, 20 nt, Artificial Sequence
  SAMD9 targeting guide sequence portion
aaguaaauagagcauaugag

SEQ ID NO: 18375 - RNA, 20 nt, Artificial Sequence
  SAMD9 targeting guide sequence portion
aaguaaauuuugggaaugcu

SEQ ID NO: 18376 - RNA, 20 nt, Artificial Sequence
  SAMD9 targeting guide sequence portion
aaguacagaagcaaguuugu

SEQ ID NO: 18377 - RNA, 20 nt, Artificial Sequence
  SAMD9 targeting guide sequence portion
aaguguguucauguguuugu

SEQ ID NO: 18378 - RNA, 20 nt, Artificial Sequence
  SAMD9 targeting guide sequence portion
aaguuugugagauacaucau

SEQ ID NO: 18379 - RNA, 20 nt, Artificial Sequence
  SAMD9 targeting guide sequence portion
aauaagagaaaaaagaagga

SEQ ID NO: 18380 - RNA, 20 nt, Artificial Sequence
  SAMD9 targeting guide sequence portion
aauaauacagcaaacacaca

SEQ ID NO: 18381 - RNA, 20 nt, Artificial Sequence
  SAMD9 targeting guide sequence portion
aauacaaacacaugaacaca

SEQ ID NO: 18382 - RNA, 20 nt, Artificial Sequence
  SAMD9 targeting guide sequence portion
aauacagcaaacacacauua

SEQ ID NO: 18383 - RNA, 20 nt, Artificial Sequence
  SAMD9 targeting guide sequence portion
aauaccaaauacaaacacau

SEQ ID NO: 18384 - RNA, 20 nt, Artificial Sequence
  SAMD9 targeting guide sequence portion
aauacucauaugcucuauuu

SEQ ID NO: 18385 - RNA, 20 nt, Artificial Sequence
  SAMD9 targeting guide sequence portion
aauagagcauaugaguauua

SEQ ID NO: 18386 - RNA, 20 nt, Artificial Sequence
  SAMD9 targeting guide sequence portion
aauagucacauucucucaag

SEQ ID NO: 18387 - RNA, 20 nt, Artificial Sequence
  SAMD9 targeting guide sequence portion
aaucauuaauaaggauaaac

SEQ ID NO: 18388 - RNA, 20 nt, Artificial Sequence
  SAMD9 targeting guide sequence portion
aaugaagcaagagaauuaug

SEQ ID NO: 18389 - RNA, 20 nt, Artificial Sequence
  SAMD9 targeting guide sequence portion
aaugaauuaucucuugagag

SEQ ID NO: 18390 - RNA, 20 nt, Artificial Sequence
  SAMD9 targeting guide sequence portion
aaugauuguuugcuauaaug

SEQ ID NO: 18391 - RNA, 20 nt, Artificial Sequence
  SAMD9 targeting guide sequence portion
aaugcuuccagucaguauau

SEQ ID NO: 18392 - RNA, 20 nt, Artificial Sequence
  SAMD9 targeting guide sequence portion
aaugugacuauugccaguuu

SEQ ID NO: 18393 - RNA, 20 nt, Artificial Sequence
  SAMD9 targeting guide sequence portion
aauguguguuugcuguauua

SEQ ID NO: 18394 - RNA, 20 nt, Artificial Sequence
  SAMD9 targeting guide sequence portion
aauuaucucuugagagaaug

SEQ ID NO: 18395 - RNA, 20 nt, Artificial Sequence
  SAMD9 targeting guide sequence portion
aauuauguauaguaugccac

SEQ ID NO: 18396 - RNA, 20 nt, Artificial Sequence
  SAMD9 targeting guide sequence portion
aauucauuggcauauccuuu

SEQ ID NO: 18397 - RNA, 20 nt, Artificial Sequence
  SAMD9 targeting guide sequence portion
aauucucuugcuucauucac

SEQ ID NO: 18398 - RNA, 20 nt, Artificial Sequence
  SAMD9 targeting guide sequence portion
aauucugcuauagaaaauaa

SEQ ID NO: 18399 - RNA, 20 nt, Artificial Sequence
  SAMD9 targeting guide sequence portion
aauugaacguucuuaaauaa

SEQ ID NO: 18400 - RNA, 20 nt, Artificial Sequence
  SAMD9 targeting guide sequence portion
aauuguggcauacuauacau

SEQ ID NO: 18401 - RNA, 20 nt, Artificial Sequence
  SAMD9 targeting guide sequence portion
aauuuaaaaagcucaaaagg

SEQ ID NO: 18402 - RNA, 20 nt, Artificial Sequence
  SAMD9 targeting guide sequence portion
aauuuacuuagugaaugaag

SEQ ID NO: 18403 - RNA, 20 nt, Artificial Sequence
  SAMD9 targeting guide sequence portion
aauuuaugugggaaaagugu

SEQ ID NO: 18404 - RNA, 20 nt, Artificial Sequence
  SAMD9 targeting guide sequence portion
aauuuugggaaugcuuccag

SEQ ID NO: 18405 - RNA, 20 nt, Artificial Sequence
  SAMD9 targeting guide sequence portion
acaaacacaugaacacacuu

SEQ ID NO: 18406 - RNA, 20 nt, Artificial Sequence
  SAMD9 targeting guide sequence portion
acaaacuugcuucuguacuu

SEQ ID NO: 18407 - RNA, 20 nt, Artificial Sequence
  SAMD9 targeting guide sequence portion
acaaucauuaauaaggauaa

SEQ ID NO: 18408 - RNA, 20 nt, Artificial Sequence
  SAMD9 targeting guide sequence portion
acaauuuaugugggaaaagu

SEQ ID NO: 18409 - RNA, 20 nt, Artificial Sequence
  SAMD9 targeting guide sequence portion
acacacauuauagcaaacaa

SEQ ID NO: 18410 - RNA, 20 nt, Artificial Sequence
  SAMD9 targeting guide sequence portion
acacacuuuucccacauaaa

SEQ ID NO: 18411 - RNA, 20 nt, Artificial Sequence
  SAMD9 targeting guide sequence portion
acacaugaacacacuuuucc

SEQ ID NO: 18412 - RNA, 20 nt, Artificial Sequence
  SAMD9 targeting guide sequence portion
acacauuauagcaaacaauc

SEQ ID NO: 18413 - RNA, 20 nt, Artificial Sequence
  SAMD9 targeting guide sequence portion
acacuuuucccacauaaauu

SEQ ID NO: 18414 - RNA, 20 nt, Artificial Sequence
  SAMD9 targeting guide sequence portion
acagaagcaaguuugugaga

SEQ ID NO: 18415 - RNA, 20 nt, Artificial Sequence
  SAMD9 targeting guide sequence portion
acagcaaacacacauuauag

SEQ ID NO: 18416 - RNA, 20 nt, Artificial Sequence
  SAMD9 targeting guide sequence portion
acauaaauuguggcauacua

SEQ ID NO: 18417 - RNA, 20 nt, Artificial Sequence
  SAMD9 targeting guide sequence portion
acauaauucucuugcuucau

SEQ ID NO: 18418 - RNA, 20 nt, Artificial Sequence
  SAMD9 targeting guide sequence portion
acauagauaaaguaaauaga

SEQ ID NO: 18419 - RNA, 20 nt, Artificial Sequence
  SAMD9 targeting guide sequence portion
acaucaugauagacauagau

SEQ ID NO: 18420 - RNA, 20 nt, Artificial Sequence
  SAMD9 targeting guide sequence portion
acaugaacacacuuuuccca

SEQ ID NO: 18421 - RNA, 20 nt, Artificial Sequence
  SAMD9 targeting guide sequence portion
acauucucucaagagauaau

SEQ ID NO: 18422 - RNA, 20 nt, Artificial Sequence
  SAMD9 targeting guide sequence portion
accaaauacaaacacaugaa

SEQ ID NO: 18423 - RNA, 20 nt, Artificial Sequence
  SAMD9 targeting guide sequence portion
acguucaauucugcuauaga

SEQ ID NO: 18424 - RNA, 20 nt, Artificial Sequence
  SAMD9 targeting guide sequence portion
acguucuuaaauaauacagc

SEQ ID NO: 18425 - RNA, 20 nt, Artificial Sequence
  SAMD9 targeting guide sequence portion
acuaaguaaauuuugggaau

SEQ ID NO: 18426 - RNA, 20 nt, Artificial Sequence
  SAMD9 targeting guide sequence portion
acuaaguacagaagcaaguu

SEQ ID NO: 18427 - RNA, 20 nt, Artificial Sequence
  SAMD9 targeting guide sequence portion
acuauacauaauucucuugc

SEQ ID NO: 18428 - RNA, 20 nt, Artificial Sequence
  SAMD9 targeting guide sequence portion
acuaucucuauauauacuga

SEQ ID NO: 18429 - RNA, 20 nt, Artificial Sequence
  SAMD9 targeting guide sequence portion
acuaugcuuaauacucauau

SEQ ID NO: 18430 - RNA, 20 nt, Artificial Sequence
  SAMD9 targeting guide sequence portion
acuauugccaguuucuucug

SEQ ID NO: 18431 - RNA, 20 nt, Artificial Sequence
  SAMD9 targeting guide sequence portion
acucauaugcucuauuuacu

SEQ ID NO: 18432 - RNA, 20 nt, Artificial Sequence
  SAMD9 targeting guide sequence portion
acugacuggaagcauuccca

SEQ ID NO: 18433 - RNA, 20 nt, Artificial Sequence
  SAMD9 targeting guide sequence portion
acuggaagcauucccaaaau

SEQ ID NO: 18434 - RNA, 20 nt, Artificial Sequence
  SAMD9 targeting guide sequence portion
acuggcaauagucacauucu

SEQ ID NO: 18435 - RNA, 20 nt, Artificial Sequence
  SAMD9 targeting guide sequence portion
acuuagugaaugaagcaaga

SEQ ID NO: 18436 - RNA, 20 nt, Artificial Sequence
  SAMD9 targeting guide sequence portion
acuuaguuucaaauauccuu

SEQ ID NO: 18437 - RNA, 20 nt, Artificial Sequence
  SAMD9 targeting guide sequence portion
acuugcuucuguacuuaguu

SEQ ID NO: 18438 - RNA, 20 nt, Artificial Sequence
  SAMD9 targeting guide sequence portion
acuuuaucuaugucuaucau

SEQ ID NO: 18439 - RNA, 20 nt, Artificial Sequence
  SAMD9 targeting guide sequence portion
acuuuucccacauaaauugu

SEQ ID NO: 18440 - RNA, 20 nt, Artificial Sequence
  SAMD9 targeting guide sequence portion
agaaaaaagaaggauauuug

SEQ ID NO: 18441 - RNA, 20 nt, Artificial Sequence
  SAMD9 targeting guide sequence portion
agaaaauaagagaaaaaaga

SEQ ID NO: 18442 - RNA, 20 nt, Artificial Sequence
  SAMD9 targeting guide sequence portion
agaaacuggcaauagucaca

SEQ ID NO: 18443 - RNA, 20 nt, Artificial Sequence
  SAMD9 targeting guide sequence portion
agaaagaauaccaaauacaa

SEQ ID NO: 18444 - RNA, 20 nt, Artificial Sequence
  SAMD9 targeting guide sequence portion
agaacguucaauucugcuau

SEQ ID NO: 18445 - RNA, 20 nt, Artificial Sequence
  SAMD9 targeting guide sequence portion
agaagaaacuggcaauaguc

SEQ ID NO: 18446 - RNA, 20 nt, Artificial Sequence
  SAMD9 targeting guide sequence portion
agaagcaaguuugugagaua

SEQ ID NO: 18447 - RNA, 20 nt, Artificial Sequence
  SAMD9 targeting guide sequence portion
agaaggauauuugaaacuaa

SEQ ID NO: 18448 - RNA, 20 nt, Artificial Sequence
  SAMD9 targeting guide sequence portion
agaauaccaaauacaaacac

SEQ ID NO: 18449 - RNA, 20 nt, Artificial Sequence
  SAMD9 targeting guide sequence portion
agaaugugacuauugccagu

SEQ ID NO: 18450 - RNA, 20 nt, Artificial Sequence
  SAMD9 targeting guide sequence portion
agaauuauguauaguaugcc

SEQ ID NO: 18451 - RNA, 20 nt, Artificial Sequence
  SAMD9 targeting guide sequence portion
agaauugaacguucuuaaau

SEQ ID NO: 18452 - RNA, 20 nt, Artificial Sequence
  SAMD9 targeting guide sequence portion
agacauagauaaaguaaaua

SEQ ID NO: 18453 - RNA, 20 nt, Artificial Sequence
  SAMD9 targeting guide sequence portion
agagaaaaaagaaggauauu

SEQ ID NO: 18454 - RNA, 20 nt, Artificial Sequence
  SAMD9 targeting guide sequence portion
agagaaagaauaccaaauac

SEQ ID NO: 18455 - RNA, 20 nt, Artificial Sequence
  SAMD9 targeting guide sequence portion
agagaaugugacuauugcca

SEQ ID NO: 18456 - RNA, 20 nt, Artificial Sequence
  SAMD9 targeting guide sequence portion
agagaauuauguauaguaug

SEQ ID NO: 18457 - RNA, 20 nt, Artificial Sequence
  SAMD9 targeting guide sequence portion
agagauaauucauuggcaua

SEQ ID NO: 18458 - RNA, 20 nt, Artificial Sequence
  SAMD9 targeting guide sequence portion
agagauaguuuauccuuauu

SEQ ID NO: 18459 - RNA, 20 nt, Artificial Sequence
  SAMD9 targeting guide sequence portion
agagcauaugaguauuaagc

SEQ ID NO: 18460 - RNA, 20 nt, Artificial Sequence
  SAMD9 targeting guide sequence portion
agauaaaguaaauagagcau

SEQ ID NO: 18461 - RNA, 20 nt, Artificial Sequence
  SAMD9 targeting guide sequence portion
agauaauucauuggcauauc

SEQ ID NO: 18462 - RNA, 20 nt, Artificial Sequence
  SAMD9 targeting guide sequence portion
agauacaucaugauagacau

SEQ ID NO: 18463 - RNA, 20 nt, Artificial Sequence
  SAMD9 targeting guide sequence portion
agauaguuuauccuuauuaa

SEQ ID NO: 18464 - RNA, 20 nt, Artificial Sequence
  SAMD9 targeting guide sequence portion
agcaaacaaucauuaauaag

SEQ ID NO: 18465 - RNA, 20 nt, Artificial Sequence
  SAMD9 targeting guide sequence portion
agcaaacacacauuauagca

SEQ ID NO: 18466 - RNA, 20 nt, Artificial Sequence
  SAMD9 targeting guide sequence portion
agcaagagaauuauguauag

SEQ ID NO: 18467 - RNA, 20 nt, Artificial Sequence
  SAMD9 targeting guide sequence portion
agcaaguuugugagauacau

SEQ ID NO: 18468 - RNA, 20 nt, Artificial Sequence
  SAMD9 targeting guide sequence portion
agcagaauugaacguucuua

SEQ ID NO: 18469 - RNA, 20 nt, Artificial Sequence
  SAMD9 targeting guide sequence portion
agcauaugaguauuaagcau

SEQ ID NO: 18470 - RNA, 20 nt, Artificial Sequence
  SAMD9 targeting guide sequence portion
agcauucccaaaauuuacuu

SEQ ID NO: 18471 - RNA, 20 nt, Artificial Sequence
  SAMD9 targeting guide sequence portion
agcucaaaaggauaugccaa

SEQ ID NO: 18472 - RNA, 20 nt, Artificial Sequence
  SAMD9 targeting guide sequence portion
aggauaaacuaucucuauau

SEQ ID NO: 18473 - RNA, 20 nt, Artificial Sequence
  SAMD9 targeting guide sequence portion
aggauaugccaaugaauuau

SEQ ID NO: 18474 - RNA, 20 nt, Artificial Sequence
  SAMD9 targeting guide sequence portion
aggauauuugaaacuaagua

SEQ ID NO: 18475 - RNA, 20 nt, Artificial Sequence
  SAMD9 targeting guide sequence portion
agggaugcagaagaaacugg

SEQ ID NO: 18476 - RNA, 20 nt, Artificial Sequence
  SAMD9 targeting guide sequence portion
aguaaauagagcauaugagu

SEQ ID NO: 18477 - RNA, 20 nt, Artificial Sequence
  SAMD9 targeting guide sequence portion
aguaaauuuugggaaugcuu

SEQ ID NO: 18478 - RNA, 20 nt, Artificial Sequence
  SAMD9 targeting guide sequence portion
aguacagaagcaaguuugug

SEQ ID NO: 18479 - RNA, 20 nt, Artificial Sequence
  SAMD9 targeting guide sequence portion
aguauauauagagauaguuu

SEQ ID NO: 18480 - RNA, 20 nt, Artificial Sequence
  SAMD9 targeting guide sequence portion
aguaugccacaauuuaugug

SEQ ID NO: 18481 - RNA, 20 nt, Artificial Sequence
  SAMD9 targeting guide sequence portion
aguauuaagcauaguuagaa

SEQ ID NO: 18482 - RNA, 20 nt, Artificial Sequence
  SAMD9 targeting guide sequence portion
agucacauucucucaagaga

SEQ ID NO: 18483 - RNA, 20 nt, Artificial Sequence
  SAMD9 targeting guide sequence portion
agucaguauauauagagaua

SEQ ID NO: 18484 - RNA, 20 nt, Artificial Sequence
  SAMD9 targeting guide sequence portion
agugaaugaagcaagagaau

SEQ ID NO: 18485 - RNA, 20 nt, Artificial Sequence
  SAMD9 targeting guide sequence portion
aguguguucauguguuugua

SEQ ID NO: 18486 - RNA, 20 nt, Artificial Sequence
  SAMD9 targeting guide sequence portion
aguuuauccuuauuaaugau

SEQ ID NO: 18487 - RNA, 20 nt, Artificial Sequence
  SAMD9 targeting guide sequence portion
aguuucaaauauccuucuuu

SEQ ID NO: 18488 - RNA, 20 nt, Artificial Sequence
  SAMD9 targeting guide sequence portion
aguuucuucugcaucccucc

SEQ ID NO: 18489 - RNA, 20 nt, Artificial Sequence
  SAMD9 targeting guide sequence portion
aguuugugagauacaucaug

SEQ ID NO: 18490 - RNA, 20 nt, Artificial Sequence
  SAMD9 targeting guide sequence portion
auaaacuaucucuauauaua

SEQ ID NO: 18491 - RNA, 20 nt, Artificial Sequence
  SAMD9 targeting guide sequence portion
auaaaguaaauagagcauau

SEQ ID NO: 18492 - RNA, 20 nt, Artificial Sequence
  SAMD9 targeting guide sequence portion
auaaauuguggcauacuaua

SEQ ID NO: 18493 - RNA, 20 nt, Artificial Sequence
  SAMD9 targeting guide sequence portion
auaagagaaaaaagaaggau

SEQ ID NO: 18494 - RNA, 20 nt, Artificial Sequence
  SAMD9 targeting guide sequence portion
auaauacagcaaacacacau

SEQ ID NO: 18495 - RNA, 20 nt, Artificial Sequence
  SAMD9 targeting guide sequence portion
auaauguguguuugcuguau

SEQ ID NO: 18496 - RNA, 20 nt, Artificial Sequence
  SAMD9 targeting guide sequence portion
auaauucauuggcauauccu

SEQ ID NO: 18497 - RNA, 20 nt, Artificial Sequence
  SAMD9 targeting guide sequence portion
auaauucucuugcuucauuc

SEQ ID NO: 18498 - RNA, 20 nt, Artificial Sequence
  SAMD9 targeting guide sequence portion
auacaaacacaugaacacac

SEQ ID NO: 18499 - RNA, 20 nt, Artificial Sequence
  SAMD9 targeting guide sequence portion
auacagcaaacacacauuau

SEQ ID NO: 18500 - RNA, 20 nt, Artificial Sequence
  SAMD9 targeting guide sequence portion
auacauaauucucuugcuuc

SEQ ID NO: 18501 - RNA, 20 nt, Artificial Sequence
  SAMD9 targeting guide sequence portion
auacaucaugauagacauag

SEQ ID NO: 18502 - RNA, 20 nt, Artificial Sequence
  SAMD9 targeting guide sequence portion
auaccaaauacaaacacaug

SEQ ID NO: 18503 - RNA, 20 nt, Artificial Sequence
  SAMD9 targeting guide sequence portion
auacuauacauaauucucuu

SEQ ID NO: 18504 - RNA, 20 nt, Artificial Sequence
  SAMD9 targeting guide sequence portion
auacucauaugcucuauuua

SEQ ID NO: 18505 - RNA, 20 nt, Artificial Sequence
  SAMD9 targeting guide sequence portion
auacugacuggaagcauucc

SEQ ID NO: 18506 - RNA, 20 nt, Artificial Sequence
  SAMD9 targeting guide sequence portion
auagaaaauaagagaaaaaa

SEQ ID NO: 18507 - RNA, 20 nt, Artificial Sequence
  SAMD9 targeting guide sequence portion
auagacauagauaaaguaaa

SEQ ID NO: 18508 - RNA, 20 nt, Artificial Sequence
  SAMD9 targeting guide sequence portion
auagagauaguuuauccuua

SEQ ID NO: 18509 - RNA, 20 nt, Artificial Sequence
  SAMD9 targeting guide sequence portion
auagagcauaugaguauuaa

SEQ ID NO: 18510 - RNA, 20 nt, Artificial Sequence
  SAMD9 targeting guide sequence portion
auagauaaaguaaauagagc

SEQ ID NO: 18511 - RNA, 20 nt, Artificial Sequence
  SAMD9 targeting guide sequence portion
auagcaaacaaucauuaaua

SEQ ID NO: 18512 - RNA, 20 nt, Artificial Sequence
  SAMD9 targeting guide sequence portion
auagcagaauugaacguucu

SEQ ID NO: 18513 - RNA, 20 nt, Artificial Sequence
  SAMD9 targeting guide sequence portion
auaguaugccacaauuuaug

SEQ ID NO: 18514 - RNA, 20 nt, Artificial Sequence
  SAMD9 targeting guide sequence portion
auagucacauucucucaaga

SEQ ID NO: 18515 - RNA, 20 nt, Artificial Sequence
  SAMD9 targeting guide sequence portion
auauacugacuggaagcauu

SEQ ID NO: 18516 - RNA, 20 nt, Artificial Sequence
  SAMD9 targeting guide sequence portion
auauauacugacuggaagca

SEQ ID NO: 18517 - RNA, 20 nt, Artificial Sequence
  SAMD9 targeting guide sequence portion
auauccuucuuuuuucucuu

SEQ ID NO: 18518 - RNA, 20 nt, Artificial Sequence
  SAMD9 targeting guide sequence portion
auaugaguauuaagcauagu

SEQ ID NO: 18519 - RNA, 20 nt, Artificial Sequence
  SAMD9 targeting guide sequence portion
auaugccaaugaauuaucuc

SEQ ID NO: 18520 - RNA, 20 nt, Artificial Sequence
  SAMD9 targeting guide sequence portion
auaugcucuauuuacuuuau

SEQ ID NO: 18521 - RNA, 20 nt, Artificial Sequence
  SAMD9 targeting guide sequence portion
auauuugaaacuaaguacag

SEQ ID NO: 18522 - RNA, 20 nt, Artificial Sequence
  SAMD9 targeting guide sequence portion
aucaugauagacauagauaa

SEQ ID NO: 18523 - RNA, 20 nt, Artificial Sequence
  SAMD9 targeting guide sequence portion
aucaugauguaucucacaaa

SEQ ID NO: 18524 - RNA, 20 nt, Artificial Sequence
  SAMD9 targeting guide sequence portion
aucauuaauaaggauaaacu

SEQ ID NO: 18525 - RNA, 20 nt, Artificial Sequence
  SAMD9 targeting guide sequence portion
aucccuccagagaaagaaua

SEQ ID NO: 18526 - RNA, 20 nt, Artificial Sequence
  SAMD9 targeting guide sequence portion
aucccuuucuaacuaugcuu

SEQ ID NO: 18527 - RNA, 20 nt, Artificial Sequence
  SAMD9 targeting guide sequence portion
auccuuauuaaugauuguuu

SEQ ID NO: 18528 - RNA, 20 nt, Artificial Sequence
  SAMD9 targeting guide sequence portion
auccuucuuuuuucucuuau

SEQ ID NO: 18529 - RNA, 20 nt, Artificial Sequence
  SAMD9 targeting guide sequence portion
auccuuuugagcuuuuuaaa

SEQ ID NO: 18530 - RNA, 20 nt, Artificial Sequence
  SAMD9 targeting guide sequence portion
aucuaugucuaucaugaugu

SEQ ID NO: 18531 - RNA, 20 nt, Artificial Sequence
  SAMD9 targeting guide sequence portion
aucucacaaacuugcuucug

SEQ ID NO: 18532 - RNA, 20 nt, Artificial Sequence
  SAMD9 targeting guide sequence portion
aucucuauauauacugacug

SEQ ID NO: 18533 - RNA, 20 nt, Artificial Sequence
  SAMD9 targeting guide sequence portion
aucucuugagagaaugugac

SEQ ID NO: 18534 - RNA, 20 nt, Artificial Sequence
  SAMD9 targeting guide sequence portion
augaacacacuuuucccaca

SEQ ID NO: 18535 - RNA, 20 nt, Artificial Sequence
  SAMD9 targeting guide sequence portion
augaagcaagagaauuaugu

SEQ ID NO: 18536 - RNA, 20 nt, Artificial Sequence
  SAMD9 targeting guide sequence portion
augaauuaucucuugagaga

SEQ ID NO: 18537 - RNA, 20 nt, Artificial Sequence
  SAMD9 targeting guide sequence portion
augaguauuaagcauaguua

SEQ ID NO: 18538 - RNA, 20 nt, Artificial Sequence
  SAMD9 targeting guide sequence portion
augauagacauagauaaagu

SEQ ID NO: 18539 - RNA, 20 nt, Artificial Sequence
  SAMD9 targeting guide sequence portion
augauguaucucacaaacuu

SEQ ID NO: 18540 - RNA, 20 nt, Artificial Sequence
  SAMD9 targeting guide sequence portion
augauuguuugcuauaaugu

SEQ ID NO: 18541 - RNA, 20 nt, Artificial Sequence
  SAMD9 targeting guide sequence portion
augcagaagaaacuggcaau

SEQ ID NO: 18542 - RNA, 20 nt, Artificial Sequence
  SAMD9 targeting guide sequence portion
augccaaugaauuaucucuu

SEQ ID NO: 18543 - RNA, 20 nt, Artificial Sequence
  SAMD9 targeting guide sequence portion
augccacaauuuauguggga

SEQ ID NO: 18544 - RNA, 20 nt, Artificial Sequence
  SAMD9 targeting guide sequence portion
augcucuauuuacuuuaucu

SEQ ID NO: 18545 - RNA, 20 nt, Artificial Sequence
  SAMD9 targeting guide sequence portion
augcuuaauacucauaugcu

SEQ ID NO: 18546 - RNA, 20 nt, Artificial Sequence
  SAMD9 targeting guide sequence portion
augcuuccagucaguauaua

SEQ ID NO: 18547 - RNA, 20 nt, Artificial Sequence
  SAMD9 targeting guide sequence portion
auguauaguaugccacaauu

SEQ ID NO: 18548 - RNA, 20 nt, Artificial Sequence
  SAMD9 targeting guide sequence portion
auguaucucacaaacuugcu

SEQ ID NO: 18549 - RNA, 20 nt, Artificial Sequence
  SAMD9 targeting guide sequence portion
augucuaucaugauguaucu

SEQ ID NO: 18550 - RNA, 20 nt, Artificial Sequence
  SAMD9 targeting guide sequence portion
augugacuauugccaguuuc

SEQ ID NO: 18551 - RNA, 20 nt, Artificial Sequence
  SAMD9 targeting guide sequence portion
augugggaaaaguguguuca

SEQ ID NO: 18552 - RNA, 20 nt, Artificial Sequence
  SAMD9 targeting guide sequence portion
auguguguuugcuguauuau

SEQ ID NO: 18553 - RNA, 20 nt, Artificial Sequence
  SAMD9 targeting guide sequence portion
auguguuuguauuugguauu

SEQ ID NO: 18554 - RNA, 20 nt, Artificial Sequence
  SAMD9 targeting guide sequence portion
auuaaugauuguuugcuaua

SEQ ID NO: 18555 - RNA, 20 nt, Artificial Sequence
  SAMD9 targeting guide sequence portion
auuauagcaaacaaucauua

SEQ ID NO: 18556 - RNA, 20 nt, Artificial Sequence
  SAMD9 targeting guide sequence portion
auuaucucuugagagaaugu

SEQ ID NO: 18557 - RNA, 20 nt, Artificial Sequence
  SAMD9 targeting guide sequence portion
auuauguauaguaugccaca

SEQ ID NO: 18558 - RNA, 20 nt, Artificial Sequence
  SAMD9 targeting guide sequence portion
auuauuuaagaacguucaau

SEQ ID NO: 18559 - RNA, 20 nt, Artificial Sequence
  SAMD9 targeting guide sequence portion
auucacuaaguaaauuuugg

SEQ ID NO: 18560 - RNA, 20 nt, Artificial Sequence
  SAMD9 targeting guide sequence portion
auucauuggcauauccuuuu

SEQ ID NO: 18561 - RNA, 20 nt, Artificial Sequence
  SAMD9 targeting guide sequence portion
auucccaaaauuuacuuagu

SEQ ID NO: 18562 - RNA, 20 nt, Artificial Sequence
  SAMD9 targeting guide sequence portion
auucucucaagagauaauuc

SEQ ID NO: 18563 - RNA, 20 nt, Artificial Sequence
  SAMD9 targeting guide sequence portion
auucucuugcuucauucacu

SEQ ID NO: 18564 - RNA, 20 nt, Artificial Sequence
  SAMD9 targeting guide sequence portion
auucugcuauagaaaauaag

SEQ ID NO: 18565 - RNA, 20 nt, Artificial Sequence
  SAMD9 targeting guide sequence portion
auucuuucucuggagggaug

SEQ ID NO: 18566 - RNA, 20 nt, Artificial Sequence
  SAMD9 targeting guide sequence portion
auugaacguucuuaaauaau

SEQ ID NO: 18567 - RNA, 20 nt, Artificial Sequence
  SAMD9 targeting guide sequence portion
auugccaguuucuucugcau

SEQ ID NO: 18568 - RNA, 20 nt, Artificial Sequence
  SAMD9 targeting guide sequence portion
auuggcauauccuuuugagc

SEQ ID NO: 18569 - RNA, 20 nt, Artificial Sequence
  SAMD9 targeting guide sequence portion
auuguggcauacuauacaua

SEQ ID NO: 18570 - RNA, 20 nt, Artificial Sequence
  SAMD9 targeting guide sequence portion
auuguuugcuauaaugugug

SEQ ID NO: 18571 - RNA, 20 nt, Artificial Sequence
  SAMD9 targeting guide sequence portion
auuuaaaaagcucaaaagga

SEQ ID NO: 18572 - RNA, 20 nt, Artificial Sequence
  SAMD9 targeting guide sequence portion
auuuaagaacguucaauucu

SEQ ID NO: 18573 - RNA, 20 nt, Artificial Sequence
  SAMD9 targeting guide sequence portion
auuuacuuagugaaugaagc

SEQ ID NO: 18574 - RNA, 20 nt, Artificial Sequence
  SAMD9 targeting guide sequence portion
auuuacuuuaucuaugucua

SEQ ID NO: 18575 - RNA, 20 nt, Artificial Sequence
  SAMD9 targeting guide sequence portion
auuuaugugggaaaagugug

SEQ ID NO: 18576 - RNA, 20 nt, Artificial Sequence
  SAMD9 targeting guide sequence portion
auuugaaacuaaguacagaa

SEQ ID NO: 18577 - RNA, 20 nt, Artificial Sequence
  SAMD9 targeting guide sequence portion
auuugguauucuuucucugg

SEQ ID NO: 18578 - RNA, 20 nt, Artificial Sequence
  SAMD9 targeting guide sequence portion
auuuucuauagcagaauuga

SEQ ID NO: 18579 - RNA, 20 nt, Artificial Sequence
  SAMD9 targeting guide sequence portion
auuuugggaaugcuuccagu

SEQ ID NO: 18580 - RNA, 20 nt, Artificial Sequence
  SAMD9 targeting guide sequence portion
caaaaggauaugccaaugaa

SEQ ID NO: 18581 - RNA, 20 nt, Artificial Sequence
  SAMD9 targeting guide sequence portion
caaaauuuaaaaagcucaaa

SEQ ID NO: 18582 - RNA, 20 nt, Artificial Sequence
  SAMD9 targeting guide sequence portion
caaaauuuacuuagugaaug

SEQ ID NO: 18583 - RNA, 20 nt, Artificial Sequence
  SAMD9 targeting guide sequence portion
caaacaaucauuaauaagga

SEQ ID NO: 18584 - RNA, 20 nt, Artificial Sequence
  SAMD9 targeting guide sequence portion
caaacacacauuauagcaaa

SEQ ID NO: 18585 - RNA, 20 nt, Artificial Sequence
  SAMD9 targeting guide sequence portion
caaacacaugaacacacuuu

SEQ ID NO: 18586 - RNA, 20 nt, Artificial Sequence
  SAMD9 targeting guide sequence portion
caaacuugcuucuguacuua

SEQ ID NO: 18587 - RNA, 20 nt, Artificial Sequence
  SAMD9 targeting guide sequence portion
caaauacaaacacaugaaca

SEQ ID NO: 18588 - RNA, 20 nt, Artificial Sequence
  SAMD9 targeting guide sequence portion
caaauauccuucuuuuuucu

SEQ ID NO: 18589 - RNA, 20 nt, Artificial Sequence
  SAMD9 targeting guide sequence portion
caagagaauuauguauagua

SEQ ID NO: 18590 - RNA, 20 nt, Artificial Sequence
  SAMD9 targeting guide sequence portion
caagagauaauucauuggca

SEQ ID NO: 18591 - RNA, 20 nt, Artificial Sequence
  SAMD9 targeting guide sequence portion
caaguuugugagauacauca

SEQ ID NO: 18592 - RNA, 20 nt, Artificial Sequence
  SAMD9 targeting guide sequence portion
caauagucacauucucucaa

SEQ ID NO: 18593 - RNA, 20 nt, Artificial Sequence
  SAMD9 targeting guide sequence portion
caaucauuaauaaggauaaa

SEQ ID NO: 18594 - RNA, 20 nt, Artificial Sequence
  SAMD9 targeting guide sequence portion
caaugaauuaucucuugaga

SEQ ID NO: 18595 - RNA, 20 nt, Artificial Sequence
  SAMD9 targeting guide sequence portion
caauucugcuauagaaaaua

SEQ ID NO: 18596 - RNA, 20 nt, Artificial Sequence
  SAMD9 targeting guide sequence portion
caauuuaugugggaaaagug

SEQ ID NO: 18597 - RNA, 20 nt, Artificial Sequence
  SAMD9 targeting guide sequence portion
cacaaacuugcuucuguacu

SEQ ID NO: 18598 - RNA, 20 nt, Artificial Sequence
  SAMD9 targeting guide sequence portion
cacaauuuaugugggaaaag

SEQ ID NO: 18599 - RNA, 20 nt, Artificial Sequence
  SAMD9 targeting guide sequence portion
cacacauuauagcaaacaau

SEQ ID NO: 18600 - RNA, 20 nt, Artificial Sequence
  SAMD9 targeting guide sequence portion
cacacuuuucccacauaaau

SEQ ID NO: 18601 - RNA, 20 nt, Artificial Sequence
  SAMD9 targeting guide sequence portion
cacauaaauuguggcauacu

SEQ ID NO: 18602 - RNA, 20 nt, Artificial Sequence
  SAMD9 targeting guide sequence portion
cacaugaacacacuuuuccc

SEQ ID NO: 18603 - RNA, 20 nt, Artificial Sequence
  SAMD9 targeting guide sequence portion
cacauuauagcaaacaauca

SEQ ID NO: 18604 - RNA, 20 nt, Artificial Sequence
  SAMD9 targeting guide sequence portion
cacauucucucaagagauaa

SEQ ID NO: 18605 - RNA, 20 nt, Artificial Sequence
  SAMD9 targeting guide sequence portion
cacuaaguaaauuuugggaa

SEQ ID NO: 18606 - RNA, 20 nt, Artificial Sequence
  SAMD9 targeting guide sequence portion
cacuuuucccacauaaauug

SEQ ID NO: 18607 - RNA, 20 nt, Artificial Sequence
  SAMD9 targeting guide sequence portion
cagaagaaacuggcaauagu

SEQ ID NO: 18608 - RNA, 20 nt, Artificial Sequence
  SAMD9 targeting guide sequence portion
cagaagcaaguuugugagau

SEQ ID NO: 18609 - RNA, 20 nt, Artificial Sequence
  SAMD9 targeting guide sequence portion
cagaauugaacguucuuaaa

SEQ ID NO: 18610 - RNA, 20 nt, Artificial Sequence
  SAMD9 targeting guide sequence portion
cagagaaagaauaccaaaua

SEQ ID NO: 18611 - RNA, 20 nt, Artificial Sequence
  SAMD9 targeting guide sequence portion
cagcaaacacacauuauagc

SEQ ID NO: 18612 - RNA, 20 nt, Artificial Sequence
  SAMD9 targeting guide sequence portion
caguauauauagagauaguu

SEQ ID NO: 18613 - RNA, 20 nt, Artificial Sequence
  SAMD9 targeting guide sequence portion
cagucaguauauauagagau

SEQ ID NO: 18614 - RNA, 20 nt, Artificial Sequence
  SAMD9 targeting guide sequence portion
caguuucuucugcaucccuc

SEQ ID NO: 18615 - RNA, 20 nt, Artificial Sequence
  SAMD9 targeting guide sequence portion
cauaaauuguggcauacuau

SEQ ID NO: 18616 - RNA, 20 nt, Artificial Sequence
  SAMD9 targeting guide sequence portion
cauaauucucuugcuucauu

SEQ ID NO: 18617 - RNA, 20 nt, Artificial Sequence
  SAMD9 targeting guide sequence portion
cauacuauacauaauucucu

SEQ ID NO: 18618 - RNA, 20 nt, Artificial Sequence
  SAMD9 targeting guide sequence portion
cauagauaaaguaaauagag

SEQ ID NO: 18619 - RNA, 20 nt, Artificial Sequence
  SAMD9 targeting guide sequence portion
cauauccuuuugagcuuuuu

SEQ ID NO: 18620 - RNA, 20 nt, Artificial Sequence
  SAMD9 targeting guide sequence portion
cauaugaguauuaagcauag

SEQ ID NO: 18621 - RNA, 20 nt, Artificial Sequence
  SAMD9 targeting guide sequence portion
cauaugcucuauuuacuuua

SEQ ID NO: 18622 - RNA, 20 nt, Artificial Sequence
  SAMD9 targeting guide sequence portion
caucaugauagacauagaua

SEQ ID NO: 18623 - RNA, 20 nt, Artificial Sequence
  SAMD9 targeting guide sequence portion
caucccuccagagaaagaau

SEQ ID NO: 18624 - RNA, 20 nt, Artificial Sequence
  SAMD9 targeting guide sequence portion
caugaacacacuuuucccac

SEQ ID NO: 18625 - RNA, 20 nt, Artificial Sequence
  SAMD9 targeting guide sequence portion
caugauagacauagauaaag

SEQ ID NO: 18626 - RNA, 20 nt, Artificial Sequence
  SAMD9 targeting guide sequence portion
caugauguaucucacaaacu

SEQ ID NO: 18627 - RNA, 20 nt, Artificial Sequence
  SAMD9 targeting guide sequence portion
cauguguuuguauuugguau

SEQ ID NO: 18628 - RNA, 20 nt, Artificial Sequence
  SAMD9 targeting guide sequence portion
cauuaauaaggauaaacuau

SEQ ID NO: 18629 - RNA, 20 nt, Artificial Sequence
  SAMD9 targeting guide sequence portion
cauuauagcaaacaaucauu

SEQ ID NO: 18630 - RNA, 20 nt, Artificial Sequence
  SAMD9 targeting guide sequence portion
cauucacuaaguaaauuuug

SEQ ID NO: 18631 - RNA, 20 nt, Artificial Sequence
  SAMD9 targeting guide sequence portion
cauucccaaaauuuacuuag

SEQ ID NO: 18632 - RNA, 20 nt, Artificial Sequence
  SAMD9 targeting guide sequence portion
cauucucucaagagauaauu

SEQ ID NO: 18633 - RNA, 20 nt, Artificial Sequence
  SAMD9 targeting guide sequence portion
cauuggcauauccuuuugag

SEQ ID NO: 18634 - RNA, 20 nt, Artificial Sequence
  SAMD9 targeting guide sequence portion
ccaaaauuuacuuagugaau

SEQ ID NO: 18635 - RNA, 20 nt, Artificial Sequence
  SAMD9 targeting guide sequence portion
ccaaauacaaacacaugaac

SEQ ID NO: 18636 - RNA, 20 nt, Artificial Sequence
  SAMD9 targeting guide sequence portion
ccaaugaauuaucucuugag

SEQ ID NO: 18637 - RNA, 20 nt, Artificial Sequence
  SAMD9 targeting guide sequence portion
ccacaauuuaugugggaaaa

SEQ ID NO: 18638 - RNA, 20 nt, Artificial Sequence
  SAMD9 targeting guide sequence portion
ccacauaaauuguggcauac

SEQ ID NO: 18639 - RNA, 20 nt, Artificial Sequence
  SAMD9 targeting guide sequence portion
ccagagaaagaauaccaaau

SEQ ID NO: 18640 - RNA, 20 nt, Artificial Sequence
  SAMD9 targeting guide sequence portion
ccagucaguauauauagaga

SEQ ID NO: 18641 - RNA, 20 nt, Artificial Sequence
  SAMD9 targeting guide sequence portion
ccaguuucuucugcaucccu

SEQ ID NO: 18642 - RNA, 20 nt, Artificial Sequence
  SAMD9 targeting guide sequence portion
cccaaaauuuacuuagugaa

SEQ ID NO: 18643 - RNA, 20 nt, Artificial Sequence
  SAMD9 targeting guide sequence portion
cccacauaaauuguggcaua

SEQ ID NO: 18644 - RNA, 20 nt, Artificial Sequence
  SAMD9 targeting guide sequence portion
cccuccagagaaagaauacc

SEQ ID NO: 18645 - RNA, 20 nt, Artificial Sequence
  SAMD9 targeting guide sequence portion
cccuuucuaacuaugcuuaa

SEQ ID NO: 18646 - RNA, 20 nt, Artificial Sequence
  SAMD9 targeting guide sequence portion
ccuccagagaaagaauacca

SEQ ID NO: 18647 - RNA, 20 nt, Artificial Sequence
  SAMD9 targeting guide sequence portion
ccuuauuaaugauuguuugc

SEQ ID NO: 18648 - RNA, 20 nt, Artificial Sequence
  SAMD9 targeting guide sequence portion
ccuucuuuuuucucuuauuu

SEQ ID NO: 18649 - RNA, 20 nt, Artificial Sequence
  SAMD9 targeting guide sequence portion
ccuuucuaacuaugcuuaau

SEQ ID NO: 18650 - RNA, 20 nt, Artificial Sequence
  SAMD9 targeting guide sequence portion
ccuuuugagcuuuuuaaauu

SEQ ID NO: 18651 - RNA, 20 nt, Artificial Sequence
  SAMD9 targeting guide sequence portion
cguucaauucugcuauagaa

SEQ ID NO: 18652 - RNA, 20 nt, Artificial Sequence
  SAMD9 targeting guide sequence portion
cguucuuaaauaauacagca

SEQ ID NO: 18653 - RNA, 20 nt, Artificial Sequence
  SAMD9 targeting guide sequence portion
cuaacuaugcuuaauacuca

SEQ ID NO: 18654 - RNA, 20 nt, Artificial Sequence
  SAMD9 targeting guide sequence portion
cuaaguaaauuuugggaaug

SEQ ID NO: 18655 - RNA, 20 nt, Artificial Sequence
  SAMD9 targeting guide sequence portion
cuaaguacagaagcaaguuu

SEQ ID NO: 18656 - RNA, 20 nt, Artificial Sequence
  SAMD9 targeting guide sequence portion
cuauaauguguguuugcugu

SEQ ID NO: 18657 - RNA, 20 nt, Artificial Sequence
  SAMD9 targeting guide sequence portion
cuauacauaauucucuugcu

SEQ ID NO: 18658 - RNA, 20 nt, Artificial Sequence
  SAMD9 targeting guide sequence portion
cuauagaaaauaagagaaaa

SEQ ID NO: 18659 - RNA, 20 nt, Artificial Sequence
  SAMD9 targeting guide sequence portion
cuauagcagaauugaacguu

SEQ ID NO: 18660 - RNA, 20 nt, Artificial Sequence
  SAMD9 targeting guide sequence portion
cuauauauacugacuggaag

SEQ ID NO: 18661 - RNA, 20 nt, Artificial Sequence
  SAMD9 targeting guide sequence portion
cuaucaugauguaucucaca

SEQ ID NO: 18662 - RNA, 20 nt, Artificial Sequence
  SAMD9 targeting guide sequence portion
cuaucucuauauauacugac

SEQ ID NO: 18663 - RNA, 20 nt, Artificial Sequence
  SAMD9 targeting guide sequence portion
cuaugcuuaauacucauaug

SEQ ID NO: 18664 - RNA, 20 nt, Artificial Sequence
  SAMD9 targeting guide sequence portion
cuaugucuaucaugauguau

SEQ ID NO: 18665 - RNA, 20 nt, Artificial Sequence
  SAMD9 targeting guide sequence portion
cuauugccaguuucuucugc

SEQ ID NO: 18666 - RNA, 20 nt, Artificial Sequence
  SAMD9 targeting guide sequence portion
cuauuuacuuuaucuauguc

SEQ ID NO: 18667 - RNA, 20 nt, Artificial Sequence
  SAMD9 targeting guide sequence portion
cucaaaaggauaugccaaug

SEQ ID NO: 18668 - RNA, 20 nt, Artificial Sequence
  SAMD9 targeting guide sequence portion
cucaagagauaauucauugg

SEQ ID NO: 18669 - RNA, 20 nt, Artificial Sequence
  SAMD9 targeting guide sequence portion
cucacaaacuugcuucugua

SEQ ID NO: 18670 - RNA, 20 nt, Artificial Sequence
  SAMD9 targeting guide sequence portion
cucauaugcucuauuuacuu

SEQ ID NO: 18671 - RNA, 20 nt, Artificial Sequence
  SAMD9 targeting guide sequence portion
cuccagagaaagaauaccaa

SEQ ID NO: 18672 - RNA, 20 nt, Artificial Sequence
  SAMD9 targeting guide sequence portion
cucuauauauacugacugga

SEQ ID NO: 18673 - RNA, 20 nt, Artificial Sequence
  SAMD9 targeting guide sequence portion
cucuauuuacuuuaucuaug

SEQ ID NO: 18674 - RNA, 20 nt, Artificial Sequence
  SAMD9 targeting guide sequence portion
cucucaagagauaauucauu

SEQ ID NO: 18675 - RNA, 20 nt, Artificial Sequence
  SAMD9 targeting guide sequence portion
cucuggagggaugcagaaga

SEQ ID NO: 18676 - RNA, 20 nt, Artificial Sequence
  SAMD9 targeting guide sequence portion
cucuuauuuucuauagcaga

SEQ ID NO: 18677 - RNA, 20 nt, Artificial Sequence
  SAMD9 targeting guide sequence portion
cucuugagagaaugugacua

SEQ ID NO: 18678 - RNA, 20 nt, Artificial Sequence
  SAMD9 targeting guide sequence portion
cucuugcuucauucacuaag

SEQ ID NO: 18679 - RNA, 20 nt, Artificial Sequence
  SAMD9 targeting guide sequence portion
cugacuggaagcauucccaa

SEQ ID NO: 18680 - RNA, 20 nt, Artificial Sequence
  SAMD9 targeting guide sequence portion
cugcaucccuccagagaaag

SEQ ID NO: 18681 - RNA, 20 nt, Artificial Sequence
  SAMD9 targeting guide sequence portion
cugcuauagaaaauaagaga

SEQ ID NO: 18682 - RNA, 20 nt, Artificial Sequence
  SAMD9 targeting guide sequence portion
cuggaagcauucccaaaauu

SEQ ID NO: 18683 - RNA, 20 nt, Artificial Sequence
  SAMD9 targeting guide sequence portion
cuggagggaugcagaagaaa

SEQ ID NO: 18684 - RNA, 20 nt, Artificial Sequence
  SAMD9 targeting guide sequence portion
cuggcaauagucacauucuc

SEQ ID NO: 18685 - RNA, 20 nt, Artificial Sequence
  SAMD9 targeting guide sequence portion
cuguacuuaguuucaaauau

SEQ ID NO: 18686 - RNA, 20 nt, Artificial Sequence
  SAMD9 targeting guide sequence portion
cuguauuauuuaagaacguu

SEQ ID NO: 18687 - RNA, 20 nt, Artificial Sequence
  SAMD9 targeting guide sequence portion
cuuaaauaauacagcaaaca

SEQ ID NO: 18688 - RNA, 20 nt, Artificial Sequence
  SAMD9 targeting guide sequence portion
cuuaauacucauaugcucua

SEQ ID NO: 18689 - RNA, 20 nt, Artificial Sequence
  SAMD9 targeting guide sequence portion
cuuagugaaugaagcaagag

SEQ ID NO: 18690 - RNA, 20 nt, Artificial Sequence
  SAMD9 targeting guide sequence portion
cuuaguuucaaauauccuuc

SEQ ID NO: 18691 - RNA, 20 nt, Artificial Sequence
  SAMD9 targeting guide sequence portion
cuuauuaaugauuguuugcu

SEQ ID NO: 18692 - RNA, 20 nt, Artificial Sequence
  SAMD9 targeting guide sequence portion
cuuauuuucuauagcagaau

SEQ ID NO: 18693 - RNA, 20 nt, Artificial Sequence
  SAMD9 targeting guide sequence portion
cuucauucacuaaguaaauu

SEQ ID NO: 18694 - RNA, 20 nt, Artificial Sequence
  SAMD9 targeting guide sequence portion
cuuccagucaguauauauag

SEQ ID NO: 18695 - RNA, 20 nt, Artificial Sequence
  SAMD9 targeting guide sequence portion
cuucugcaucccuccagaga

SEQ ID NO: 18696 - RNA, 20 nt, Artificial Sequence
  SAMD9 targeting guide sequence portion
cuucuguacuuaguuucaaa

SEQ ID NO: 18697 - RNA, 20 nt, Artificial Sequence
  SAMD9 targeting guide sequence portion
cuucuuuuuucucuuauuuu

SEQ ID NO: 18698 - RNA, 20 nt, Artificial Sequence
  SAMD9 targeting guide sequence portion
cuugagagaaugugacuauu

SEQ ID NO: 18699 - RNA, 20 nt, Artificial Sequence
  SAMD9 targeting guide sequence portion
cuugcuucauucacuaagua

SEQ ID NO: 18700 - RNA, 20 nt, Artificial Sequence
  SAMD9 targeting guide sequence portion
cuugcuucuguacuuaguuu

SEQ ID NO: 18701 - RNA, 20 nt, Artificial Sequence
  SAMD9 targeting guide sequence portion
cuuuaucuaugucuaucaug

SEQ ID NO: 18702 - RNA, 20 nt, Artificial Sequence
  SAMD9 targeting guide sequence portion
cuuucuaacuaugcuuaaua

SEQ ID NO: 18703 - RNA, 20 nt, Artificial Sequence
  SAMD9 targeting guide sequence portion
cuuucucuggagggaugcag

SEQ ID NO: 18704 - RNA, 20 nt, Artificial Sequence
  SAMD9 targeting guide sequence portion
cuuuucccacauaaauugug

SEQ ID NO: 18705 - RNA, 20 nt, Artificial Sequence
  SAMD9 targeting guide sequence portion
cuuuuuucucuuauuuucua

SEQ ID NO: 18706 - RNA, 20 nt, Artificial Sequence
  SAMD9 targeting guide sequence portion
gaaaaaagaaggauauuuga

SEQ ID NO: 18707 - RNA, 20 nt, Artificial Sequence
  SAMD9 targeting guide sequence portion
gaaaaguguguucauguguu

SEQ ID NO: 18708 - RNA, 20 nt, Artificial Sequence
  SAMD9 targeting guide sequence portion
gaaaauaagagaaaaaagaa

SEQ ID NO: 18709 - RNA, 20 nt, Artificial Sequence
  SAMD9 targeting guide sequence portion
gaaacuaaguacagaagcaa

SEQ ID NO: 18710 - RNA, 20 nt, Artificial Sequence
  SAMD9 targeting guide sequence portion
gaaacuggcaauagucacau

SEQ ID NO: 18711 - RNA, 20 nt, Artificial Sequence
  SAMD9 targeting guide sequence portion
gaaagaauaccaaauacaaa

SEQ ID NO: 18712 - RNA, 20 nt, Artificial Sequence
  SAMD9 targeting guide sequence portion
gaacacacuuuucccacaua

SEQ ID NO: 18713 - RNA, 20 nt, Artificial Sequence
  SAMD9 targeting guide sequence portion
gaacguucaauucugcuaua

SEQ ID NO: 18714 - RNA, 20 nt, Artificial Sequence
  SAMD9 targeting guide sequence portion
gaacguucuuaaauaauaca

SEQ ID NO: 18715 - RNA, 20 nt, Artificial Sequence
  SAMD9 targeting guide sequence portion
gaagaaacuggcaauaguca

SEQ ID NO: 18716 - RNA, 20 nt, Artificial Sequence
  SAMD9 targeting guide sequence portion
gaagcaagagaauuauguau

SEQ ID NO: 18717 - RNA, 20 nt, Artificial Sequence
  SAMD9 targeting guide sequence portion
gaagcaaguuugugagauac

SEQ ID NO: 18718 - RNA, 20 nt, Artificial Sequence
  SAMD9 targeting guide sequence portion
gaagcauucccaaaauuuac

SEQ ID NO: 18719 - RNA, 20 nt, Artificial Sequence
  SAMD9 targeting guide sequence portion
gaaggauauuugaaacuaag

SEQ ID NO: 18720 - RNA, 20 nt, Artificial Sequence
  SAMD9 targeting guide sequence portion
gaauaccaaauacaaacaca

SEQ ID NO: 18721 - RNA, 20 nt, Artificial Sequence
  SAMD9 targeting guide sequence portion
gaaugaagcaagagaauuau

SEQ ID NO: 18722 - RNA, 20 nt, Artificial Sequence
  SAMD9 targeting guide sequence portion
gaaugcuuccagucaguaua

SEQ ID NO: 18723 - RNA, 20 nt, Artificial Sequence
  SAMD9 targeting guide sequence portion
gaaugugacuauugccaguu

SEQ ID NO: 18724 - RNA, 20 nt, Artificial Sequence
  SAMD9 targeting guide sequence portion
gaauuaucucuugagagaau

SEQ ID NO: 18725 - RNA, 20 nt, Artificial Sequence
  SAMD9 targeting guide sequence portion
gaauuauguauaguaugcca

SEQ ID NO: 18726 - RNA, 20 nt, Artificial Sequence
  SAMD9 targeting guide sequence portion
gaauugaacguucuuaaaua

SEQ ID NO: 18727 - RNA, 20 nt, Artificial Sequence
  SAMD9 targeting guide sequence portion
gacauagauaaaguaaauag

SEQ ID NO: 18728 - RNA, 20 nt, Artificial Sequence
  SAMD9 targeting guide sequence portion
gacuauugccaguuucuucu

SEQ ID NO: 18729 - RNA, 20 nt, Artificial Sequence
  SAMD9 targeting guide sequence portion
gacuggaagcauucccaaaa

SEQ ID NO: 18730 - RNA, 20 nt, Artificial Sequence
  SAMD9 targeting guide sequence portion
gagaaaaaagaaggauauuu

SEQ ID NO: 18731 - RNA, 20 nt, Artificial Sequence
  SAMD9 targeting guide sequence portion
gagaaagaauaccaaauaca

SEQ ID NO: 18732 - RNA, 20 nt, Artificial Sequence
  SAMD9 targeting guide sequence portion
gagaaugugacuauugccag

SEQ ID NO: 18733 - RNA, 20 nt, Artificial Sequence
  SAMD9 targeting guide sequence portion
gagaauuauguauaguaugc

SEQ ID NO: 18734 - RNA, 20 nt, Artificial Sequence
  SAMD9 targeting guide sequence portion
gagagaaugugacuauugcc

SEQ ID NO: 18735 - RNA, 20 nt, Artificial Sequence
  SAMD9 targeting guide sequence portion
gagauaauucauuggcauau

SEQ ID NO: 18736 - RNA, 20 nt, Artificial Sequence
  SAMD9 targeting guide sequence portion
gagauacaucaugauagaca

SEQ ID NO: 18737 - RNA, 20 nt, Artificial Sequence
  SAMD9 targeting guide sequence portion
gagauaguuuauccuuauua

SEQ ID NO: 18738 - RNA, 20 nt, Artificial Sequence
  SAMD9 targeting guide sequence portion
gagcauaugaguauuaagca

SEQ ID NO: 18739 - RNA, 20 nt, Artificial Sequence
  SAMD9 targeting guide sequence portion
gagggaugcagaagaaacug

SEQ ID NO: 18740 - RNA, 20 nt, Artificial Sequence
  SAMD9 targeting guide sequence portion
gaguauuaagcauaguuaga

SEQ ID NO: 18741 - RNA, 20 nt, Artificial Sequence
  SAMD9 targeting guide sequence portion
gauaaacuaucucuauauau

SEQ ID NO: 18742 - RNA, 20 nt, Artificial Sequence
  SAMD9 targeting guide sequence portion
gauaaaguaaauagagcaua

SEQ ID NO: 18743 - RNA, 20 nt, Artificial Sequence
  SAMD9 targeting guide sequence portion
gauaauucauuggcauaucc

SEQ ID NO: 18744 - RNA, 20 nt, Artificial Sequence
  SAMD9 targeting guide sequence portion
gauacaucaugauagacaua

SEQ ID NO: 18745 - RNA, 20 nt, Artificial Sequence
  SAMD9 targeting guide sequence portion
gauagacauagauaaaguaa

SEQ ID NO: 18746 - RNA, 20 nt, Artificial Sequence
  SAMD9 targeting guide sequence portion
gauaguuuauccuuauuaau

SEQ ID NO: 18747 - RNA, 20 nt, Artificial Sequence
  SAMD9 targeting guide sequence portion
gauaugccaaugaauuaucu

SEQ ID NO: 18748 - RNA, 20 nt, Artificial Sequence
  SAMD9 targeting guide sequence portion
gauauuugaaacuaaguaca

SEQ ID NO: 18749 - RNA, 20 nt, Artificial Sequence
  SAMD9 targeting guide sequence portion
gaugcagaagaaacuggcaa

SEQ ID NO: 18750 - RNA, 20 nt, Artificial Sequence
  SAMD9 targeting guide sequence portion
gauguaucucacaaacuugc

SEQ ID NO: 18751 - RNA, 20 nt, Artificial Sequence
  SAMD9 targeting guide sequence portion
gauuguuugcuauaaugugu

SEQ ID NO: 18752 - RNA, 20 nt, Artificial Sequence
  SAMD9 targeting guide sequence portion
gcaaacaaucauuaauaagg

SEQ ID NO: 18753 - RNA, 20 nt, Artificial Sequence
  SAMD9 targeting guide sequence portion
gcaaacacacauuauagcaa

SEQ ID NO: 18754 - RNA, 20 nt, Artificial Sequence
  SAMD9 targeting guide sequence portion
gcaagagaauuauguauagu

SEQ ID NO: 18755 - RNA, 20 nt, Artificial Sequence
  SAMD9 targeting guide sequence portion
gcaaguuugugagauacauc

SEQ ID NO: 18756 - RNA, 20 nt, Artificial Sequence
  SAMD9 targeting guide sequence portion
gcaauagucacauucucuca

SEQ ID NO: 18757 - RNA, 20 nt, Artificial Sequence
  SAMD9 targeting guide sequence portion
gcagaagaaacuggcaauag

SEQ ID NO: 18758 - RNA, 20 nt, Artificial Sequence
  SAMD9 targeting guide sequence portion
gcagaauugaacguucuuaa

SEQ ID NO: 18759 - RNA, 20 nt, Artificial Sequence
  SAMD9 targeting guide sequence portion
gcauacuauacauaauucuc

SEQ ID NO: 18760 - RNA, 20 nt, Artificial Sequence
  SAMD9 targeting guide sequence portion
gcauauccuuuugagcuuuu

SEQ ID NO: 18761 - RNA, 20 nt, Artificial Sequence
  SAMD9 targeting guide sequence portion
gcauaugaguauuaagcaua

SEQ ID NO: 18762 - RNA, 20 nt, Artificial Sequence
  SAMD9 targeting guide sequence portion
gcaucccuccagagaaagaa

SEQ ID NO: 18763 - RNA, 20 nt, Artificial Sequence
  SAMD9 targeting guide sequence portion
gcauucccaaaauuuacuua

SEQ ID NO: 18764 - RNA, 20 nt, Artificial Sequence
  SAMD9 targeting guide sequence portion
gccaaugaauuaucucuuga

SEQ ID NO: 18765 - RNA, 20 nt, Artificial Sequence
  SAMD9 targeting guide sequence portion
gccacaauuuaugugggaaa

SEQ ID NO: 18766 - RNA, 20 nt, Artificial Sequence
  SAMD9 targeting guide sequence portion
gccaguuucuucugcauccc

SEQ ID NO: 18767 - RNA, 20 nt, Artificial Sequence
  SAMD9 targeting guide sequence portion
gcuauaauguguguuugcug

SEQ ID NO: 18768 - RNA, 20 nt, Artificial Sequence
  SAMD9 targeting guide sequence portion
gcuauagaaaauaagagaaa

SEQ ID NO: 18769 - RNA, 20 nt, Artificial Sequence
  SAMD9 targeting guide sequence portion
gcucaaaaggauaugccaau

SEQ ID NO: 18770 - RNA, 20 nt, Artificial Sequence
  SAMD9 targeting guide sequence portion
gcucuauuuacuuuaucuau

SEQ ID NO: 18771 - RNA, 20 nt, Artificial Sequence
  SAMD9 targeting guide sequence portion
gcuguauuauuuaagaacgu

SEQ ID NO: 18772 - RNA, 20 nt, Artificial Sequence
  SAMD9 targeting guide sequence portion
gcuuaauacucauaugcucu

SEQ ID NO: 18773 - RNA, 20 nt, Artificial Sequence
  SAMD9 targeting guide sequence portion
gcuucauucacuaaguaaau

SEQ ID NO: 18774 - RNA, 20 nt, Artificial Sequence
  SAMD9 targeting guide sequence portion
gcuuccagucaguauauaua

SEQ ID NO: 18775 - RNA, 20 nt, Artificial Sequence
  SAMD9 targeting guide sequence portion
gcuucuguacuuaguuucaa

SEQ ID NO: 18776 - RNA, 20 nt, Artificial Sequence
  SAMD9 targeting guide sequence portion
ggaaaaguguguucaugugu

SEQ ID NO: 18777 - RNA, 20 nt, Artificial Sequence
  SAMD9 targeting guide sequence portion
ggaagcauucccaaaauuua

SEQ ID NO: 18778 - RNA, 20 nt, Artificial Sequence
  SAMD9 targeting guide sequence portion
ggaaugcuuccagucaguau

SEQ ID NO: 18779 - RNA, 20 nt, Artificial Sequence
  SAMD9 targeting guide sequence portion
ggagggaugcagaagaaacu

SEQ ID NO: 18780 - RNA, 20 nt, Artificial Sequence
  SAMD9 targeting guide sequence portion
ggauaaacuaucucuauaua

SEQ ID NO: 18781 - RNA, 20 nt, Artificial Sequence
  SAMD9 targeting guide sequence portion
ggauaugccaaugaauuauc

SEQ ID NO: 18782 - RNA, 20 nt, Artificial Sequence
  SAMD9 targeting guide sequence portion
ggauauuugaaacuaaguac

SEQ ID NO: 18783 - RNA, 20 nt, Artificial Sequence
  SAMD9 targeting guide sequence portion
ggaugcagaagaaacuggca

SEQ ID NO: 18784 - RNA, 20 nt, Artificial Sequence
  SAMD9 targeting guide sequence portion
ggcaauagucacauucucuc

SEQ ID NO: 18785 - RNA, 20 nt, Artificial Sequence
  SAMD9 targeting guide sequence portion
ggcauacuauacauaauucu

SEQ ID NO: 18786 - RNA, 20 nt, Artificial Sequence
  SAMD9 targeting guide sequence portion
ggcauauccuuuugagcuuu

SEQ ID NO: 18787 - RNA, 20 nt, Artificial Sequence
  SAMD9 targeting guide sequence portion
gggaaaaguguguucaugug

SEQ ID NO: 18788 - RNA, 20 nt, Artificial Sequence
  SAMD9 targeting guide sequence portion
gggaaugcuuccagucagua

SEQ ID NO: 18789 - RNA, 20 nt, Artificial Sequence
  SAMD9 targeting guide sequence portion
gggaugcagaagaaacuggc

SEQ ID NO: 18790 - RNA, 20 nt, Artificial Sequence
  SAMD9 targeting guide sequence portion
gguauucuuucucuggaggg

SEQ ID NO: 18791 - RNA, 20 nt, Artificial Sequence
  SAMD9 targeting guide sequence portion
guaaauagagcauaugagua

SEQ ID NO: 18792 - RNA, 20 nt, Artificial Sequence
  SAMD9 targeting guide sequence portion
guaaauuuugggaaugcuuc

SEQ ID NO: 18793 - RNA, 20 nt, Artificial Sequence
  SAMD9 targeting guide sequence portion
guacagaagcaaguuuguga

SEQ ID NO: 18794 - RNA, 20 nt, Artificial Sequence
  SAMD9 targeting guide sequence portion
guacuuaguuucaaauaucc

SEQ ID NO: 18795 - RNA, 20 nt, Artificial Sequence
  SAMD9 targeting guide sequence portion
guauaguaugccacaauuua

SEQ ID NO: 18796 - RNA, 20 nt, Artificial Sequence
  SAMD9 targeting guide sequence portion
guauauauagagauaguuua

SEQ ID NO: 18797 - RNA, 20 nt, Artificial Sequence
  SAMD9 targeting guide sequence portion
guaucucacaaacuugcuuc

SEQ ID NO: 18798 - RNA, 20 nt, Artificial Sequence
  SAMD9 targeting guide sequence portion
guaugccacaauuuaugugg

SEQ ID NO: 18799 - RNA, 20 nt, Artificial Sequence
  SAMD9 targeting guide sequence portion
guauuauuuaagaacguuca

SEQ ID NO: 18800 - RNA, 20 nt, Artificial Sequence
  SAMD9 targeting guide sequence portion
guauucuuucucuggaggga

SEQ ID NO: 18801 - RNA, 20 nt, Artificial Sequence
  SAMD9 targeting guide sequence portion
guauuugguauucuuucucu

SEQ ID NO: 18802 - RNA, 20 nt, Artificial Sequence
  SAMD9 targeting guide sequence portion
gucacauucucucaagagau

SEQ ID NO: 18803 - RNA, 20 nt, Artificial Sequence
  SAMD9 targeting guide sequence portion
gucaguauauauagagauag

SEQ ID NO: 18804 - RNA, 20 nt, Artificial Sequence
  SAMD9 targeting guide sequence portion
gucuaucaugauguaucuca

SEQ ID NO: 18805 - RNA, 20 nt, Artificial Sequence
  SAMD9 targeting guide sequence portion
gugaaugaagcaagagaauu

SEQ ID NO: 18806 - RNA, 20 nt, Artificial Sequence
  SAMD9 targeting guide sequence portion
gugacuauugccaguuucuu

SEQ ID NO: 18807 - RNA, 20 nt, Artificial Sequence
  SAMD9 targeting guide sequence portion
gugagauacaucaugauaga

SEQ ID NO: 18808 - RNA, 20 nt, Artificial Sequence
  SAMD9 targeting guide sequence portion
guggcauacuauacauaauu

SEQ ID NO: 18809 - RNA, 20 nt, Artificial Sequence
  SAMD9 targeting guide sequence portion
gugggaaaaguguguucaug

SEQ ID NO: 18810 - RNA, 20 nt, Artificial Sequence
  SAMD9 targeting guide sequence portion
guguguucauguguuuguau

SEQ ID NO: 18811 - RNA, 20 nt, Artificial Sequence
  SAMD9 targeting guide sequence portion
guguguuugcuguauuauuu

SEQ ID NO: 18812 - RNA, 20 nt, Artificial Sequence
  SAMD9 targeting guide sequence portion
guguucauguguuuguauuu

SEQ ID NO: 18813 - RNA, 20 nt, Artificial Sequence
  SAMD9 targeting guide sequence portion
guguuugcuguauuauuuaa

SEQ ID NO: 18814 - RNA, 20 nt, Artificial Sequence
  SAMD9 targeting guide sequence portion
guguuuguauuugguauucu

SEQ ID NO: 18815 - RNA, 20 nt, Artificial Sequence
  SAMD9 targeting guide sequence portion
guucaauucugcuauagaaa

SEQ ID NO: 18816 - RNA, 20 nt, Artificial Sequence
  SAMD9 targeting guide sequence portion
guucauguguuuguauuugg

SEQ ID NO: 18817 - RNA, 20 nt, Artificial Sequence
  SAMD9 targeting guide sequence portion
guucuuaaauaauacagcaa

SEQ ID NO: 18818 - RNA, 20 nt, Artificial Sequence
  SAMD9 targeting guide sequence portion
guuuauccuuauuaaugauu

SEQ ID NO: 18819 - RNA, 20 nt, Artificial Sequence
  SAMD9 targeting guide sequence portion
guuucaaauauccuucuuuu

SEQ ID NO: 18820 - RNA, 20 nt, Artificial Sequence
  SAMD9 targeting guide sequence portion
guuucuucugcaucccucca

SEQ ID NO: 18821 - RNA, 20 nt, Artificial Sequence
  SAMD9 targeting guide sequence portion
guuugcuauaauguguguuu

SEQ ID NO: 18822 - RNA, 20 nt, Artificial Sequence
  SAMD9 targeting guide sequence portion
guuugcuguauuauuuaaga

SEQ ID NO: 18823 - RNA, 20 nt, Artificial Sequence
  SAMD9 targeting guide sequence portion
guuuguauuugguauucuuu

SEQ ID NO: 18824 - RNA, 20 nt, Artificial Sequence
  SAMD9 targeting guide sequence portion
guuugugagauacaucauga

SEQ ID NO: 18825 - RNA, 20 nt, Artificial Sequence
  SAMD9 targeting guide sequence portion
uaaaaagcucaaaaggauau

SEQ ID NO: 18826 - RNA, 20 nt, Artificial Sequence
  SAMD9 targeting guide sequence portion
uaaacuaucucuauauauac

SEQ ID NO: 18827 - RNA, 20 nt, Artificial Sequence
  SAMD9 targeting guide sequence portion
uaaaguaaauagagcauaug

SEQ ID NO: 18828 - RNA, 20 nt, Artificial Sequence
  SAMD9 targeting guide sequence portion
uaaauaauacagcaaacaca

SEQ ID NO: 18829 - RNA, 20 nt, Artificial Sequence
  SAMD9 targeting guide sequence portion
uaaauagagcauaugaguau

SEQ ID NO: 18830 - RNA, 20 nt, Artificial Sequence
  SAMD9 targeting guide sequence portion
uaaauuguggcauacuauac

SEQ ID NO: 18831 - RNA, 20 nt, Artificial Sequence
  SAMD9 targeting guide sequence portion
uaaauuuugggaaugcuucc

SEQ ID NO: 18832 - RNA, 20 nt, Artificial Sequence
  SAMD9 targeting guide sequence portion
uaacuaugcuuaauacucau

SEQ ID NO: 18833 - RNA, 20 nt, Artificial Sequence
  SAMD9 targeting guide sequence portion
uaagaacguucaauucugcu

SEQ ID NO: 18834 - RNA, 20 nt, Artificial Sequence
  SAMD9 targeting guide sequence portion
uaagagaaaaaagaaggaua

SEQ ID NO: 18835 - RNA, 20 nt, Artificial Sequence
  SAMD9 targeting guide sequence portion
uaaggauaaacuaucucuau

SEQ ID NO: 18836 - RNA, 20 nt, Artificial Sequence
  SAMD9 targeting guide sequence portion
uaaguaaauuuugggaaugc

SEQ ID NO: 18837 - RNA, 20 nt, Artificial Sequence
  SAMD9 targeting guide sequence portion
uaaguacagaagcaaguuug

SEQ ID NO: 18838 - RNA, 20 nt, Artificial Sequence
  SAMD9 targeting guide sequence portion
uaauacagcaaacacacauu

SEQ ID NO: 18839 - RNA, 20 nt, Artificial Sequence
  SAMD9 targeting guide sequence portion
uaauacucauaugcucuauu

SEQ ID NO: 18840 - RNA, 20 nt, Artificial Sequence
  SAMD9 targeting guide sequence portion
uaaugauuguuugcuauaau

SEQ ID NO: 18841 - RNA, 20 nt, Artificial Sequence
  SAMD9 targeting guide sequence portion
uaauguguguuugcuguauu

SEQ ID NO: 18842 - RNA, 20 nt, Artificial Sequence
  SAMD9 targeting guide sequence portion
uaauucauuggcauauccuu

SEQ ID NO: 18843 - RNA, 20 nt, Artificial Sequence
  SAMD9 targeting guide sequence portion
uaauucucuugcuucauuca

SEQ ID NO: 18844 - RNA, 20 nt, Artificial Sequence
  SAMD9 targeting guide sequence portion
uacaaacacaugaacacacu

SEQ ID NO: 18845 - RNA, 20 nt, Artificial Sequence
  SAMD9 targeting guide sequence portion
uacagaagcaaguuugugag

SEQ ID NO: 18846 - RNA, 20 nt, Artificial Sequence
  SAMD9 targeting guide sequence portion
uacagcaaacacacauuaua

SEQ ID NO: 18847 - RNA, 20 nt, Artificial Sequence
  SAMD9 targeting guide sequence portion
uacauaauucucuugcuuca

SEQ ID NO: 18848 - RNA, 20 nt, Artificial Sequence
  SAMD9 targeting guide sequence portion
uacaucaugauagacauaga

SEQ ID NO: 18849 - RNA, 20 nt, Artificial Sequence
  SAMD9 targeting guide sequence portion
uaccaaauacaaacacauga

SEQ ID NO: 18850 - RNA, 20 nt, Artificial Sequence
  SAMD9 targeting guide sequence portion
uacuauacauaauucucuug

SEQ ID NO: 18851 - RNA, 20 nt, Artificial Sequence
  SAMD9 targeting guide sequence portion
uacucauaugcucuauuuac

SEQ ID NO: 18852 - RNA, 20 nt, Artificial Sequence
  SAMD9 targeting guide sequence portion
uacugacuggaagcauuccc

SEQ ID NO: 18853 - RNA, 20 nt, Artificial Sequence
  SAMD9 targeting guide sequence portion
uacuuagugaaugaagcaag

SEQ ID NO: 18854 - RNA, 20 nt, Artificial Sequence
  SAMD9 targeting guide sequence portion
uacuuaguuucaaauauccu

SEQ ID NO: 18855 - RNA, 20 nt, Artificial Sequence
  SAMD9 targeting guide sequence portion
uacuuuaucuaugucuauca

SEQ ID NO: 18856 - RNA, 20 nt, Artificial Sequence
  SAMD9 targeting guide sequence portion
uagaaaauaagagaaaaaag

SEQ ID NO: 18857 - RNA, 20 nt, Artificial Sequence
  SAMD9 targeting guide sequence portion
uagacauagauaaaguaaau

SEQ ID NO: 18858 - RNA, 20 nt, Artificial Sequence
  SAMD9 targeting guide sequence portion
uagagauaguuuauccuuau

SEQ ID NO: 18859 - RNA, 20 nt, Artificial Sequence
  SAMD9 targeting guide sequence portion
uagagcauaugaguauuaag

SEQ ID NO: 18860 - RNA, 20 nt, Artificial Sequence
  SAMD9 targeting guide sequence portion
uagauaaaguaaauagagca

SEQ ID NO: 18861 - RNA, 20 nt, Artificial Sequence
  SAMD9 targeting guide sequence portion
uagcaaacaaucauuaauaa

SEQ ID NO: 18862 - RNA, 20 nt, Artificial Sequence
  SAMD9 targeting guide sequence portion
uagcagaauugaacguucuu

SEQ ID NO: 18863 - RNA, 20 nt, Artificial Sequence
  SAMD9 targeting guide sequence portion
uaguaugccacaauuuaugu

SEQ ID NO: 18864 - RNA, 20 nt, Artificial Sequence
  SAMD9 targeting guide sequence portion
uagucacauucucucaagag

SEQ ID NO: 18865 - RNA, 20 nt, Artificial Sequence
  SAMD9 targeting guide sequence portion
uagugaaugaagcaagagaa

SEQ ID NO: 18866 - RNA, 20 nt, Artificial Sequence
  SAMD9 targeting guide sequence portion
uaguuucaaauauccuucuu

SEQ ID NO: 18867 - RNA, 20 nt, Artificial Sequence
  SAMD9 targeting guide sequence portion
uauaauguguguuugcugua

SEQ ID NO: 18868 - RNA, 20 nt, Artificial Sequence
  SAMD9 targeting guide sequence portion
uauacauaauucucuugcuu

SEQ ID NO: 18869 - RNA, 20 nt, Artificial Sequence
  SAMD9 targeting guide sequence portion
uauacugacuggaagcauuc

SEQ ID NO: 18870 - RNA, 20 nt, Artificial Sequence
  SAMD9 targeting guide sequence portion
uauagaaaauaagagaaaaa

SEQ ID NO: 18871 - RNA, 20 nt, Artificial Sequence
  SAMD9 targeting guide sequence portion
uauagcaaacaaucauuaau

SEQ ID NO: 18872 - RNA, 20 nt, Artificial Sequence
  SAMD9 targeting guide sequence portion
uauagcagaauugaacguuc

SEQ ID NO: 18873 - RNA, 20 nt, Artificial Sequence
  SAMD9 targeting guide sequence portion
uauaguaugccacaauuuau

SEQ ID NO: 18874 - RNA, 20 nt, Artificial Sequence
  SAMD9 targeting guide sequence portion
uauauacugacuggaagcau

SEQ ID NO: 18875 - RNA, 20 nt, Artificial Sequence
  SAMD9 targeting guide sequence portion
uauauauacugacuggaagc

SEQ ID NO: 18876 - RNA, 20 nt, Artificial Sequence
  SAMD9 targeting guide sequence portion
uaucaugauguaucucacaa

SEQ ID NO: 18877 - RNA, 20 nt, Artificial Sequence
  SAMD9 targeting guide sequence portion
uauccuuauuaaugauuguu

SEQ ID NO: 18878 - RNA, 20 nt, Artificial Sequence
  SAMD9 targeting guide sequence portion
uauccuucuuuuuucucuua

SEQ ID NO: 18879 - RNA, 20 nt, Artificial Sequence
  SAMD9 targeting guide sequence portion
uauccuuuugagcuuuuuaa

SEQ ID NO: 18880 - RNA, 20 nt, Artificial Sequence
  SAMD9 targeting guide sequence portion
uaucuaugucuaucaugaug

SEQ ID NO: 18881 - RNA, 20 nt, Artificial Sequence
  SAMD9 targeting guide sequence portion
uaucucacaaacuugcuucu

SEQ ID NO: 18882 - RNA, 20 nt, Artificial Sequence
  SAMD9 targeting guide sequence portion
uaucucuauauauacugacu

SEQ ID NO: 18883 - RNA, 20 nt, Artificial Sequence
  SAMD9 targeting guide sequence portion
uaucucuugagagaauguga

SEQ ID NO: 18884 - RNA, 20 nt, Artificial Sequence
  SAMD9 targeting guide sequence portion
uaugaguauuaagcauaguu

SEQ ID NO: 18885 - RNA, 20 nt, Artificial Sequence
  SAMD9 targeting guide sequence portion
uaugccaaugaauuaucucu

SEQ ID NO: 18886 - RNA, 20 nt, Artificial Sequence
  SAMD9 targeting guide sequence portion
uaugccacaauuuauguggg

SEQ ID NO: 18887 - RNA, 20 nt, Artificial Sequence
  SAMD9 targeting guide sequence portion
uaugcucuauuuacuuuauc

SEQ ID NO: 18888 - RNA, 20 nt, Artificial Sequence
  SAMD9 targeting guide sequence portion
uaugcuuaauacucauaugc

SEQ ID NO: 18889 - RNA, 20 nt, Artificial Sequence
  SAMD9 targeting guide sequence portion
uauguauaguaugccacaau

SEQ ID NO: 18890 - RNA, 20 nt, Artificial Sequence
  SAMD9 targeting guide sequence portion
uaugucuaucaugauguauc

SEQ ID NO: 18891 - RNA, 20 nt, Artificial Sequence
  SAMD9 targeting guide sequence portion
uaugugggaaaaguguguuc

SEQ ID NO: 18892 - RNA, 20 nt, Artificial Sequence
  SAMD9 targeting guide sequence portion
uauuaaugauuguuugcuau

SEQ ID NO: 18893 - RNA, 20 nt, Artificial Sequence
  SAMD9 targeting guide sequence portion
uauuauuuaagaacguucaa

SEQ ID NO: 18894 - RNA, 20 nt, Artificial Sequence
  SAMD9 targeting guide sequence portion
uauucuuucucuggagggau

SEQ ID NO: 18895 - RNA, 20 nt, Artificial Sequence
  SAMD9 targeting guide sequence portion
uauugccaguuucuucugca

SEQ ID NO: 18896 - RNA, 20 nt, Artificial Sequence
  SAMD9 targeting guide sequence portion
uauuuaagaacguucaauuc

SEQ ID NO: 18897 - RNA, 20 nt, Artificial Sequence
  SAMD9 targeting guide sequence portion
uauuuacuuuaucuaugucu

SEQ ID NO: 18898 - RNA, 20 nt, Artificial Sequence
  SAMD9 targeting guide sequence portion
uauuugaaacuaaguacaga

SEQ ID NO: 18899 - RNA, 20 nt, Artificial Sequence
  SAMD9 targeting guide sequence portion
uauuugguauucuuucucug

SEQ ID NO: 18900 - RNA, 20 nt, Artificial Sequence
  SAMD9 targeting guide sequence portion
uauuuucuauagcagaauug

SEQ ID NO: 18901 - RNA, 20 nt, Artificial Sequence
  SAMD9 targeting guide sequence portion
ucaaaaggauaugccaauga

SEQ ID NO: 18902 - RNA, 20 nt, Artificial Sequence
  SAMD9 targeting guide sequence portion
ucaaaauuuaaaaagcucaa

SEQ ID NO: 18903 - RNA, 20 nt, Artificial Sequence
  SAMD9 targeting guide sequence portion
ucaaauauccuucuuuuuuc

SEQ ID NO: 18904 - RNA, 20 nt, Artificial Sequence
  SAMD9 targeting guide sequence portion
ucaagagauaauucauuggc

SEQ ID NO: 18905 - RNA, 20 nt, Artificial Sequence
  SAMD9 targeting guide sequence portion
ucaauucugcuauagaaaau

SEQ ID NO: 18906 - RNA, 20 nt, Artificial Sequence
  SAMD9 targeting guide sequence portion
ucacaaacuugcuucuguac

SEQ ID NO: 18907 - RNA, 20 nt, Artificial Sequence
  SAMD9 targeting guide sequence portion
ucacauucucucaagagaua

SEQ ID NO: 18908 - RNA, 20 nt, Artificial Sequence
  SAMD9 targeting guide sequence portion
ucacuaaguaaauuuuggga

SEQ ID NO: 18909 - RNA, 20 nt, Artificial Sequence
  SAMD9 targeting guide sequence portion
ucaguauauauagagauagu

SEQ ID NO: 18910 - RNA, 20 nt, Artificial Sequence
  SAMD9 targeting guide sequence portion
ucauaugcucuauuuacuuu

SEQ ID NO: 18911 - RNA, 20 nt, Artificial Sequence
  SAMD9 targeting guide sequence portion
ucaugauagacauagauaaa

SEQ ID NO: 18912 - RNA, 20 nt, Artificial Sequence
  SAMD9 targeting guide sequence portion
ucaugauguaucucacaaac

SEQ ID NO: 18913 - RNA, 20 nt, Artificial Sequence
  SAMD9 targeting guide sequence portion
ucauguguuuguauuuggua

SEQ ID NO: 18914 - RNA, 20 nt, Artificial Sequence
  SAMD9 targeting guide sequence portion
ucauuaauaaggauaaacua

SEQ ID NO: 18915 - RNA, 20 nt, Artificial Sequence
  SAMD9 targeting guide sequence portion
ucauucacuaaguaaauuuu

SEQ ID NO: 18916 - RNA, 20 nt, Artificial Sequence
  SAMD9 targeting guide sequence portion
ucauuggcauauccuuuuga

SEQ ID NO: 18917 - RNA, 20 nt, Artificial Sequence
  SAMD9 targeting guide sequence portion
uccagagaaagaauaccaaa

SEQ ID NO: 18918 - RNA, 20 nt, Artificial Sequence
  SAMD9 targeting guide sequence portion
uccagucaguauauauagag

SEQ ID NO: 18919 - RNA, 20 nt, Artificial Sequence
  SAMD9 targeting guide sequence portion
ucccaaaauuuacuuaguga

SEQ ID NO: 18920 - RNA, 20 nt, Artificial Sequence
  SAMD9 targeting guide sequence portion
ucccacauaaauuguggcau

SEQ ID NO: 18921 - RNA, 20 nt, Artificial Sequence
  SAMD9 targeting guide sequence portion
ucccuccagagaaagaauac

SEQ ID NO: 18922 - RNA, 20 nt, Artificial Sequence
  SAMD9 targeting guide sequence portion
ucccuuucuaacuaugcuua

SEQ ID NO: 18923 - RNA, 20 nt, Artificial Sequence
  SAMD9 targeting guide sequence portion
uccuuauuaaugauuguuug

SEQ ID NO: 18924 - RNA, 20 nt, Artificial Sequence
  SAMD9 targeting guide sequence portion
uccuucuuuuuucucuuauu

SEQ ID NO: 18925 - RNA, 20 nt, Artificial Sequence
  SAMD9 targeting guide sequence portion
uccuuuugagcuuuuuaaau

SEQ ID NO: 18926 - RNA, 20 nt, Artificial Sequence
  SAMD9 targeting guide sequence portion
ucuaacuaugcuuaauacuc

SEQ ID NO: 18927 - RNA, 20 nt, Artificial Sequence
  SAMD9 targeting guide sequence portion
ucuauagcagaauugaacgu

SEQ ID NO: 18928 - RNA, 20 nt, Artificial Sequence
  SAMD9 targeting guide sequence portion
ucuauauauacugacuggaa

SEQ ID NO: 18929 - RNA, 20 nt, Artificial Sequence
  SAMD9 targeting guide sequence portion
ucuaucaugauguaucucac

SEQ ID NO: 18930 - RNA, 20 nt, Artificial Sequence
  SAMD9 targeting guide sequence portion
ucuaugucuaucaugaugua

SEQ ID NO: 18931 - RNA, 20 nt, Artificial Sequence
  SAMD9 targeting guide sequence portion
ucuauuuacuuuaucuaugu

SEQ ID NO: 18932 - RNA, 20 nt, Artificial Sequence
  SAMD9 targeting guide sequence portion
ucucaagagauaauucauug

SEQ ID NO: 18933 - RNA, 20 nt, Artificial Sequence
  SAMD9 targeting guide sequence portion
ucucacaaacuugcuucugu

SEQ ID NO: 18934 - RNA, 20 nt, Artificial Sequence
  SAMD9 targeting guide sequence portion
ucucuauauauacugacugg

SEQ ID NO: 18935 - RNA, 20 nt, Artificial Sequence
  SAMD9 targeting guide sequence portion
ucucucaagagauaauucau

SEQ ID NO: 18936 - RNA, 20 nt, Artificial Sequence
  SAMD9 targeting guide sequence portion
ucucuggagggaugcagaag

SEQ ID NO: 18937 - RNA, 20 nt, Artificial Sequence
  SAMD9 targeting guide sequence portion
ucucuuauuuucuauagcag

SEQ ID NO: 18938 - RNA, 20 nt, Artificial Sequence
  SAMD9 targeting guide sequence portion
ucucuugagagaaugugacu

SEQ ID NO: 18939 - RNA, 20 nt, Artificial Sequence
  SAMD9 targeting guide sequence portion
ucucuugcuucauucacuaa

SEQ ID NO: 18940 - RNA, 20 nt, Artificial Sequence
  SAMD9 targeting guide sequence portion
ucugcaucccuccagagaaa

SEQ ID NO: 18941 - RNA, 20 nt, Artificial Sequence
  SAMD9 targeting guide sequence portion
ucugcuauagaaaauaagag

SEQ ID NO: 18942 - RNA, 20 nt, Artificial Sequence
  SAMD9 targeting guide sequence portion
ucuggagggaugcagaagaa

SEQ ID NO: 18943 - RNA, 20 nt, Artificial Sequence
  SAMD9 targeting guide sequence portion
ucuguacuuaguuucaaaua

SEQ ID NO: 18944 - RNA, 20 nt, Artificial Sequence
  SAMD9 targeting guide sequence portion
ucuuaaauaauacagcaaac

SEQ ID NO: 18945 - RNA, 20 nt, Artificial Sequence
  SAMD9 targeting guide sequence portion
ucuuauuuucuauagcagaa

SEQ ID NO: 18946 - RNA, 20 nt, Artificial Sequence
  SAMD9 targeting guide sequence portion
ucuucugcaucccuccagag

SEQ ID NO: 18947 - RNA, 20 nt, Artificial Sequence
  SAMD9 targeting guide sequence portion
ucuugagagaaugugacuau

SEQ ID NO: 18948 - RNA, 20 nt, Artificial Sequence
  SAMD9 targeting guide sequence portion
ucuugcuucauucacuaagu

SEQ ID NO: 18949 - RNA, 20 nt, Artificial Sequence
  SAMD9 targeting guide sequence portion
ucuuucucuggagggaugca

SEQ ID NO: 18950 - RNA, 20 nt, Artificial Sequence
  SAMD9 targeting guide sequence portion
ucuuuuuucucuuauuuucu

SEQ ID NO: 18951 - RNA, 20 nt, Artificial Sequence
  SAMD9 targeting guide sequence portion
ugaaacuaaguacagaagca

SEQ ID NO: 18952 - RNA, 20 nt, Artificial Sequence
  SAMD9 targeting guide sequence portion
ugaacacacuuuucccacau

SEQ ID NO: 18953 - RNA, 20 nt, Artificial Sequence
  SAMD9 targeting guide sequence portion
ugaacguucuuaaauaauac

SEQ ID NO: 18954 - RNA, 20 nt, Artificial Sequence
  SAMD9 targeting guide sequence portion
ugaagcaagagaauuaugua

SEQ ID NO: 18955 - RNA, 20 nt, Artificial Sequence
  SAMD9 targeting guide sequence portion
ugaaugaagcaagagaauua

SEQ ID NO: 18956 - RNA, 20 nt, Artificial Sequence
  SAMD9 targeting guide sequence portion
ugaauuaucucuugagagaa

SEQ ID NO: 18957 - RNA, 20 nt, Artificial Sequence
  SAMD9 targeting guide sequence portion
ugacuauugccaguuucuuc

SEQ ID NO: 18958 - RNA, 20 nt, Artificial Sequence
  SAMD9 targeting guide sequence portion
ugacuggaagcauucccaaa

SEQ ID NO: 18959 - RNA, 20 nt, Artificial Sequence
  SAMD9 targeting guide sequence portion
ugagagaaugugacuauugc

SEQ ID NO: 18960 - RNA, 20 nt, Artificial Sequence
  SAMD9 targeting guide sequence portion
ugagauacaucaugauagac

SEQ ID NO: 18961 - RNA, 20 nt, Artificial Sequence
  SAMD9 targeting guide sequence portion
ugaguauuaagcauaguuag

SEQ ID NO: 18962 - RNA, 20 nt, Artificial Sequence
  SAMD9 targeting guide sequence portion
ugauagacauagauaaagua

SEQ ID NO: 18963 - RNA, 20 nt, Artificial Sequence
  SAMD9 targeting guide sequence portion
ugauguaucucacaaacuug

SEQ ID NO: 18964 - RNA, 20 nt, Artificial Sequence
  SAMD9 targeting guide sequence portion
ugauuguuugcuauaaugug

SEQ ID NO: 18965 - RNA, 20 nt, Artificial Sequence
  SAMD9 targeting guide sequence portion
ugcagaagaaacuggcaaua

SEQ ID NO: 18966 - RNA, 20 nt, Artificial Sequence
  SAMD9 targeting guide sequence portion
ugcaucccuccagagaaaga

SEQ ID NO: 18967 - RNA, 20 nt, Artificial Sequence
  SAMD9 targeting guide sequence portion
ugccaaugaauuaucucuug

SEQ ID NO: 18968 - RNA, 20 nt, Artificial Sequence
  SAMD9 targeting guide sequence portion
ugccacaauuuaugugggaa

SEQ ID NO: 18969 - RNA, 20 nt, Artificial Sequence
  SAMD9 targeting guide sequence portion
ugccaguuucuucugcaucc

SEQ ID NO: 18970 - RNA, 20 nt, Artificial Sequence
  SAMD9 targeting guide sequence portion
ugcuauaauguguguuugcu

SEQ ID NO: 18971 - RNA, 20 nt, Artificial Sequence
  SAMD9 targeting guide sequence portion
ugcuauagaaaauaagagaa

SEQ ID NO: 18972 - RNA, 20 nt, Artificial Sequence
  SAMD9 targeting guide sequence portion
ugcucuauuuacuuuaucua

SEQ ID NO: 18973 - RNA, 20 nt, Artificial Sequence
  SAMD9 targeting guide sequence portion
ugcuguauuauuuaagaacg

SEQ ID NO: 18974 - RNA, 20 nt, Artificial Sequence
  SAMD9 targeting guide sequence portion
ugcuuaauacucauaugcuc

SEQ ID NO: 18975 - RNA, 20 nt, Artificial Sequence
  SAMD9 targeting guide sequence portion
ugcuucauucacuaaguaaa

SEQ ID NO: 18976 - RNA, 20 nt, Artificial Sequence
  SAMD9 targeting guide sequence portion
ugcuuccagucaguauauau

SEQ ID NO: 18977 - RNA, 20 nt, Artificial Sequence
  SAMD9 targeting guide sequence portion
ugcuucuguacuuaguuuca

SEQ ID NO: 18978 - RNA, 20 nt, Artificial Sequence
  SAMD9 targeting guide sequence portion
uggaagcauucccaaaauuu

SEQ ID NO: 18979 - RNA, 20 nt, Artificial Sequence
  SAMD9 targeting guide sequence portion
uggagggaugcagaagaaac

SEQ ID NO: 18980 - RNA, 20 nt, Artificial Sequence
  SAMD9 targeting guide sequence portion
uggcaauagucacauucucu

SEQ ID NO: 18981 - RNA, 20 nt, Artificial Sequence
  SAMD9 targeting guide sequence portion
uggcauacuauacauaauuc

SEQ ID NO: 18982 - RNA, 20 nt, Artificial Sequence
  SAMD9 targeting guide sequence portion
uggcauauccuuuugagcuu

SEQ ID NO: 18983 - RNA, 20 nt, Artificial Sequence
  SAMD9 targeting guide sequence portion
ugggaaaaguguguucaugu

SEQ ID NO: 18984 - RNA, 20 nt, Artificial Sequence
  SAMD9 targeting guide sequence portion
ugggaaugcuuccagucagu

SEQ ID NO: 18985 - RNA, 20 nt, Artificial Sequence
  SAMD9 targeting guide sequence portion
ugguauucuuucucuggagg

SEQ ID NO: 18986 - RNA, 20 nt, Artificial Sequence
  SAMD9 targeting guide sequence portion
uguacuuaguuucaaauauc

SEQ ID NO: 18987 - RNA, 20 nt, Artificial Sequence
  SAMD9 targeting guide sequence portion
uguauaguaugccacaauuu

SEQ ID NO: 18988 - RNA, 20 nt, Artificial Sequence
  SAMD9 targeting guide sequence portion
uguaucucacaaacuugcuu

SEQ ID NO: 18989 - RNA, 20 nt, Artificial Sequence
  SAMD9 targeting guide sequence portion
uguauuauuuaagaacguuc

SEQ ID NO: 18990 - RNA, 20 nt, Artificial Sequence
  SAMD9 targeting guide sequence portion
uguauuugguauucuuucuc

SEQ ID NO: 18991 - RNA, 20 nt, Artificial Sequence
  SAMD9 targeting guide sequence portion
ugucuaucaugauguaucuc

SEQ ID NO: 18992 - RNA, 20 nt, Artificial Sequence
  SAMD9 targeting guide sequence portion
ugugacuauugccaguuucu

SEQ ID NO: 18993 - RNA, 20 nt, Artificial Sequence
  SAMD9 targeting guide sequence portion
ugugagauacaucaugauag

SEQ ID NO: 18994 - RNA, 20 nt, Artificial Sequence
  SAMD9 targeting guide sequence portion
uguggcauacuauacauaau

SEQ ID NO: 18995 - RNA, 20 nt, Artificial Sequence
  SAMD9 targeting guide sequence portion
ugugggaaaaguguguucau

SEQ ID NO: 18996 - RNA, 20 nt, Artificial Sequence
  SAMD9 targeting guide sequence portion
uguguguuugcuguauuauu

SEQ ID NO: 18997 - RNA, 20 nt, Artificial Sequence
  SAMD9 targeting guide sequence portion
uguguucauguguuuguauu

SEQ ID NO: 18998 - RNA, 20 nt, Artificial Sequence
  SAMD9 targeting guide sequence portion
uguguuugcuguauuauuua

SEQ ID NO: 18999 - RNA, 20 nt, Artificial Sequence
  SAMD9 targeting guide sequence portion
uguguuuguauuugguauuc

SEQ ID NO: 19000 - RNA, 20 nt, Artificial Sequence
  SAMD9 targeting guide sequence portion
uguucauguguuuguauuug

SEQ ID NO: 19001 - RNA, 20 nt, Artificial Sequence
  SAMD9 targeting guide sequence portion
uguuugcuauaauguguguu

SEQ ID NO: 19002 - RNA, 20 nt, Artificial Sequence
  SAMD9 targeting guide sequence portion
uguuugcuguauuauuuaag

SEQ ID NO: 19003 - RNA, 20 nt, Artificial Sequence
  SAMD9 targeting guide sequence portion
uguuuguauuugguauucuu

SEQ ID NO: 19004 - RNA, 20 nt, Artificial Sequence
  SAMD9 targeting guide sequence portion
uuaaaaagcucaaaaggaua

SEQ ID NO: 19005 - RNA, 20 nt, Artificial Sequence
  SAMD9 targeting guide sequence portion
uuaaauaauacagcaaacac

SEQ ID NO: 19006 - RNA, 20 nt, Artificial Sequence
  SAMD9 targeting guide sequence portion
uuaagaacguucaauucugc

SEQ ID NO: 19007 - RNA, 20 nt, Artificial Sequence
  SAMD9 targeting guide sequence portion
uuaauacucauaugcucuau

SEQ ID NO: 19008 - RNA, 20 nt, Artificial Sequence
  SAMD9 targeting guide sequence portion
uuaaugauuguuugcuauaa

SEQ ID NO: 19009 - RNA, 20 nt, Artificial Sequence
  SAMD9 targeting guide sequence portion
uuacuuagugaaugaagcaa

SEQ ID NO: 19010 - RNA, 20 nt, Artificial Sequence
  SAMD9 targeting guide sequence portion
uuacuuuaucuaugucuauc

SEQ ID NO: 19011 - RNA, 20 nt, Artificial Sequence
  SAMD9 targeting guide sequence portion
uuagugaaugaagcaagaga

SEQ ID NO: 19012 - RNA, 20 nt, Artificial Sequence
  SAMD9 targeting guide sequence portion
uuaguuucaaauauccuucu

SEQ ID NO: 19013 - RNA, 20 nt, Artificial Sequence
  SAMD9 targeting guide sequence portion
uuauagcaaacaaucauuaa

SEQ ID NO: 19014 - RNA, 20 nt, Artificial Sequence
  SAMD9 targeting guide sequence portion
uuauccuuauuaaugauugu

SEQ ID NO: 19015 - RNA, 20 nt, Artificial Sequence
  SAMD9 targeting guide sequence portion
uuaucuaugucuaucaugau

SEQ ID NO: 19016 - RNA, 20 nt, Artificial Sequence
  SAMD9 targeting guide sequence portion
uuaucucuugagagaaugug

SEQ ID NO: 19017 - RNA, 20 nt, Artificial Sequence
  SAMD9 targeting guide sequence portion
uuauguauaguaugccacaa

SEQ ID NO: 19018 - RNA, 20 nt, Artificial Sequence
  SAMD9 targeting guide sequence portion
uuaugugggaaaaguguguu

SEQ ID NO: 19019 - RNA, 20 nt, Artificial Sequence
  SAMD9 targeting guide sequence portion
uuauuuaagaacguucaauu

SEQ ID NO: 19020 - RNA, 20 nt, Artificial Sequence
  SAMD9 targeting guide sequence portion
uuauuuucuauagcagaauu

SEQ ID NO: 19021 - RNA, 20 nt, Artificial Sequence
  SAMD9 targeting guide sequence portion
uucaaaauuuaaaaagcuca

SEQ ID NO: 19022 - RNA, 20 nt, Artificial Sequence
  SAMD9 targeting guide sequence portion
uucaaauauccuucuuuuuu

SEQ ID NO: 19023 - RNA, 20 nt, Artificial Sequence
  SAMD9 targeting guide sequence portion
uucaauucugcuauagaaaa

SEQ ID NO: 19024 - RNA, 20 nt, Artificial Sequence
  SAMD9 targeting guide sequence portion
uucacuaaguaaauuuuggg

SEQ ID NO: 19025 - RNA, 20 nt, Artificial Sequence
  SAMD9 targeting guide sequence portion
uucauguguuuguauuuggu

SEQ ID NO: 19026 - RNA, 20 nt, Artificial Sequence
  SAMD9 targeting guide sequence portion
uucauucacuaaguaaauuu

SEQ ID NO: 19027 - RNA, 20 nt, Artificial Sequence
  SAMD9 targeting guide sequence portion
uucauuggcauauccuuuug

SEQ ID NO: 19028 - RNA, 20 nt, Artificial Sequence
  SAMD9 targeting guide sequence portion
uuccagucaguauauauaga

SEQ ID NO: 19029 - RNA, 20 nt, Artificial Sequence
  SAMD9 targeting guide sequence portion
uucccaaaauuuacuuagug

SEQ ID NO: 19030 - RNA, 20 nt, Artificial Sequence
  SAMD9 targeting guide sequence portion
uucccacauaaauuguggca

SEQ ID NO: 19031 - RNA, 20 nt, Artificial Sequence
  SAMD9 targeting guide sequence portion
uucuaacuaugcuuaauacu

SEQ ID NO: 19032 - RNA, 20 nt, Artificial Sequence
  SAMD9 targeting guide sequence portion
uucuauagcagaauugaacg

SEQ ID NO: 19033 - RNA, 20 nt, Artificial Sequence
  SAMD9 targeting guide sequence portion
uucucucaagagauaauuca

SEQ ID NO: 19034 - RNA, 20 nt, Artificial Sequence
  SAMD9 targeting guide sequence portion
uucucuggagggaugcagaa

SEQ ID NO: 19035 - RNA, 20 nt, Artificial Sequence
  SAMD9 targeting guide sequence portion
uucucuuauuuucuauagca

SEQ ID NO: 19036 - RNA, 20 nt, Artificial Sequence
  SAMD9 targeting guide sequence portion
uucucuugcuucauucacua

SEQ ID NO: 19037 - RNA, 20 nt, Artificial Sequence
  SAMD9 targeting guide sequence portion
uucugcaucccuccagagaa

SEQ ID NO: 19038 - RNA, 20 nt, Artificial Sequence
  SAMD9 targeting guide sequence portion
uucugcuauagaaaauaaga

SEQ ID NO: 19039 - RNA, 20 nt, Artificial Sequence
  SAMD9 targeting guide sequence portion
uucuguacuuaguuucaaau

SEQ ID NO: 19040 - RNA, 20 nt, Artificial Sequence
  SAMD9 targeting guide sequence portion
uucuuaaauaauacagcaaa

SEQ ID NO: 19041 - RNA, 20 nt, Artificial Sequence
  SAMD9 targeting guide sequence portion
uucuucugcaucccuccaga

SEQ ID NO: 19042 - RNA, 20 nt, Artificial Sequence
  SAMD9 targeting guide sequence portion
uucuuucucuggagggaugc

SEQ ID NO: 19043 - RNA, 20 nt, Artificial Sequence
  SAMD9 targeting guide sequence portion
uucuuuuuucucuuauuuuc

SEQ ID NO: 19044 - RNA, 20 nt, Artificial Sequence
  SAMD9 targeting guide sequence portion
uugaaacuaaguacagaagc

SEQ ID NO: 19045 - RNA, 20 nt, Artificial Sequence
  SAMD9 targeting guide sequence portion
uugaacguucuuaaauaaua

SEQ ID NO: 19046 - RNA, 20 nt, Artificial Sequence
  SAMD9 targeting guide sequence portion
uugagagaaugugacuauug

SEQ ID NO: 19047 - RNA, 20 nt, Artificial Sequence
  SAMD9 targeting guide sequence portion
uugccaguuucuucugcauc

SEQ ID NO: 19048 - RNA, 20 nt, Artificial Sequence
  SAMD9 targeting guide sequence portion
uugcuauaauguguguuugc

SEQ ID NO: 19049 - RNA, 20 nt, Artificial Sequence
  SAMD9 targeting guide sequence portion
uugcuguauuauuuaagaac

SEQ ID NO: 19050 - RNA, 20 nt, Artificial Sequence
  SAMD9 targeting guide sequence portion
uugcuucauucacuaaguaa

SEQ ID NO: 19051 - RNA, 20 nt, Artificial Sequence
  SAMD9 targeting guide sequence portion
uugcuucuguacuuaguuuc

SEQ ID NO: 19052 - RNA, 20 nt, Artificial Sequence
  SAMD9 targeting guide sequence portion
uuggcauauccuuuugagcu

SEQ ID NO: 19053 - RNA, 20 nt, Artificial Sequence
  SAMD9 targeting guide sequence portion
uugggaaugcuuccagucag

SEQ ID NO: 19054 - RNA, 20 nt, Artificial Sequence
  SAMD9 targeting guide sequence portion
uugguauucuuucucuggag

SEQ ID NO: 19055 - RNA, 20 nt, Artificial Sequence
  SAMD9 targeting guide sequence portion
uuguauuugguauucuuucu

SEQ ID NO: 19056 - RNA, 20 nt, Artificial Sequence
  SAMD9 targeting guide sequence portion
uugugagauacaucaugaua

SEQ ID NO: 19057 - RNA, 20 nt, Artificial Sequence
  SAMD9 targeting guide sequence portion
uuguggcauacuauacauaa

SEQ ID NO: 19058 - RNA, 20 nt, Artificial Sequence
  SAMD9 targeting guide sequence portion
uuguuugcuauaaugugugu

SEQ ID NO: 19059 - RNA, 20 nt, Artificial Sequence
  SAMD9 targeting guide sequence portion
uuuaaaaagcucaaaaggau

SEQ ID NO: 19060 - RNA, 20 nt, Artificial Sequence
  SAMD9 targeting guide sequence portion
uuuaagaacguucaauucug

SEQ ID NO: 19061 - RNA, 20 nt, Artificial Sequence
  SAMD9 targeting guide sequence portion
uuuacuuagugaaugaagca

SEQ ID NO: 19062 - RNA, 20 nt, Artificial Sequence
  SAMD9 targeting guide sequence portion
uuuacuuuaucuaugucuau

SEQ ID NO: 19063 - RNA, 20 nt, Artificial Sequence
  SAMD9 targeting guide sequence portion
uuuauccuuauuaaugauug

SEQ ID NO: 19064 - RNA, 20 nt, Artificial Sequence
  SAMD9 targeting guide sequence portion
uuuaucuaugucuaucauga

SEQ ID NO: 19065 - RNA, 20 nt, Artificial Sequence
  SAMD9 targeting guide sequence portion
uuuaugugggaaaagugugu

SEQ ID NO: 19066 - RNA, 20 nt, Artificial Sequence
  SAMD9 targeting guide sequence portion
uuucaaaauuuaaaaagcuc

SEQ ID NO: 19067 - RNA, 20 nt, Artificial Sequence
  SAMD9 targeting guide sequence portion
uuucaaauauccuucuuuuu

SEQ ID NO: 19068 - RNA, 20 nt, Artificial Sequence
  SAMD9 targeting guide sequence portion
uuucccacauaaauuguggc

SEQ ID NO: 19069 - RNA, 20 nt, Artificial Sequence
  SAMD9 targeting guide sequence portion
uuucuaacuaugcuuaauac

SEQ ID NO: 19070 - RNA, 20 nt, Artificial Sequence
  SAMD9 targeting guide sequence portion
uuucuauagcagaauugaac

SEQ ID NO: 19071 - RNA, 20 nt, Artificial Sequence
  SAMD9 targeting guide sequence portion
uuucucuggagggaugcaga

SEQ ID NO: 19072 - RNA, 20 nt, Artificial Sequence
  SAMD9 targeting guide sequence portion
uuucucuuauuuucuauagc

SEQ ID NO: 19073 - RNA, 20 nt, Artificial Sequence
  SAMD9 targeting guide sequence portion
uuucuucugcaucccuccag

SEQ ID NO: 19074 - RNA, 20 nt, Artificial Sequence
  SAMD9 targeting guide sequence portion
uuugaaacuaaguacagaag

SEQ ID NO: 19075 - RNA, 20 nt, Artificial Sequence
  SAMD9 targeting guide sequence portion
uuugcuauaauguguguuug

SEQ ID NO: 19076 - RNA, 20 nt, Artificial Sequence
  SAMD9 targeting guide sequence portion
uuugcuguauuauuuaagaa

SEQ ID NO: 19077 - RNA, 20 nt, Artificial Sequence
  SAMD9 targeting guide sequence portion
uuugggaaugcuuccaguca

SEQ ID NO: 19078 - RNA, 20 nt, Artificial Sequence
  SAMD9 targeting guide sequence portion
uuugguauucuuucucugga

SEQ ID NO: 19079 - RNA, 20 nt, Artificial Sequence
  SAMD9 targeting guide sequence portion
uuuguauuugguauucuuuc

SEQ ID NO: 19080 - RNA, 20 nt, Artificial Sequence
  SAMD9 targeting guide sequence portion
uuugugagauacaucaugau

SEQ ID NO: 19081 - RNA, 20 nt, Artificial Sequence
  SAMD9 targeting guide sequence portion
uuuucccacauaaauugugg

SEQ ID NO: 19082 - RNA, 20 nt, Artificial Sequence
  SAMD9 targeting guide sequence portion
uuuucuauagcagaauugaa

SEQ ID NO: 19083 - RNA, 20 nt, Artificial Sequence
  SAMD9 targeting guide sequence portion
uuuucucuuauuuucuauag

SEQ ID NO: 19084 - RNA, 20 nt, Artificial Sequence
  SAMD9 targeting guide sequence portion
uuuugggaaugcuuccaguc

SEQ ID NO: 19085 - RNA, 20 nt, Artificial Sequence
  SAMD9 targeting guide sequence portion
uuuuucucuuauuuucuaua

SEQ ID NO: 19086 - RNA, 20 nt, Artificial Sequence
  SAMD9 targeting guide sequence portion
uuuuuucucuuauuuucuau

SEQ ID NO: 19087 - RNA, 21 nt, Artificial Sequence
  SAMD9 targeting guide sequence portion
aaaaaagaaggauauuugaaa

SEQ ID NO: 19088 - RNA, 21 nt, Artificial Sequence
  SAMD9 targeting guide sequence portion
aaaaagaaggauauuugaaac

SEQ ID NO: 19089 - RNA, 21 nt, Artificial Sequence
  SAMD9 targeting guide sequence portion
aaaaagcucaaaaggauaugc

SEQ ID NO: 19090 - RNA, 21 nt, Artificial Sequence
  SAMD9 targeting guide sequence portion
aaaagaaggauauuugaaacu

SEQ ID NO: 19091 - RNA, 21 nt, Artificial Sequence
  SAMD9 targeting guide sequence portion
aaaagcucaaaaggauaugcc

SEQ ID NO: 19092 - RNA, 21 nt, Artificial Sequence
  SAMD9 targeting guide sequence portion
aaaaggauaugccaaugaauu

SEQ ID NO: 19093 - RNA, 21 nt, Artificial Sequence
  SAMD9 targeting guide sequence portion
aaaaguguguucauguguuug

SEQ ID NO: 19094 - RNA, 21 nt, Artificial Sequence
  SAMD9 targeting guide sequence portion
aaaauuuaaaaagcucaaaag

SEQ ID NO: 19095 - RNA, 21 nt, Artificial Sequence
  SAMD9 targeting guide sequence portion
aaaauuuacuuagugaaugaa

SEQ ID NO: 19096 - RNA, 21 nt, Artificial Sequence
  SAMD9 targeting guide sequence portion
aaacacacauuauagcaaaca

SEQ ID NO: 19097 - RNA, 21 nt, Artificial Sequence
  SAMD9 targeting guide sequence portion
aaacacaugaacacacuuuuc

SEQ ID NO: 19098 - RNA, 21 nt, Artificial Sequence
  SAMD9 targeting guide sequence portion
aaacuaaguacagaagcaagu

SEQ ID NO: 19099 - RNA, 21 nt, Artificial Sequence
  SAMD9 targeting guide sequence portion
aaacuaucucuauauauacug

SEQ ID NO: 19100 - RNA, 21 nt, Artificial Sequence
  SAMD9 targeting guide sequence portion
aaacuggcaauagucacauuc

SEQ ID NO: 19101 - RNA, 21 nt, Artificial Sequence
  SAMD9 targeting guide sequence portion
aaacuugcuucuguacuuagu

SEQ ID NO: 19102 - RNA, 21 nt, Artificial Sequence
  SAMD9 targeting guide sequence portion
aaagaaggauauuugaaacua

SEQ ID NO: 19103 - RNA, 21 nt, Artificial Sequence
  SAMD9 targeting guide sequence portion
aaagaauaccaaauacaaaca

SEQ ID NO: 19104 - RNA, 21 nt, Artificial Sequence
  SAMD9 targeting guide sequence portion
aaagcucaaaaggauaugcca

SEQ ID NO: 19105 - RNA, 21 nt, Artificial Sequence
  SAMD9 targeting guide sequence portion
aaaggauaugccaaugaauua

SEQ ID NO: 19106 - RNA, 21 nt, Artificial Sequence
  SAMD9 targeting guide sequence portion
aaaguaaauagagcauaugag

SEQ ID NO: 19107 - RNA, 21 nt, Artificial Sequence
  SAMD9 targeting guide sequence portion
aaaguguguucauguguuugu

SEQ ID NO: 19108 - RNA, 21 nt, Artificial Sequence
  SAMD9 targeting guide sequence portion
aaauaagagaaaaaagaagga

SEQ ID NO: 19109 - RNA, 21 nt, Artificial Sequence
  SAMD9 targeting guide sequence portion
aaauaauacagcaaacacaca

SEQ ID NO: 19110 - RNA, 21 nt, Artificial Sequence
  SAMD9 targeting guide sequence portion
aaauacaaacacaugaacaca

SEQ ID NO: 19111 - RNA, 21 nt, Artificial Sequence
  SAMD9 targeting guide sequence portion
aaauagagcauaugaguauua

SEQ ID NO: 19112 - RNA, 21 nt, Artificial Sequence
  SAMD9 targeting guide sequence portion
aaauuguggcauacuauacau

SEQ ID NO: 19113 - RNA, 21 nt, Artificial Sequence
  SAMD9 targeting guide sequence portion
aaauuuaaaaagcucaaaagg

SEQ ID NO: 19114 - RNA, 21 nt, Artificial Sequence
  SAMD9 targeting guide sequence portion
aaauuuacuuagugaaugaag

SEQ ID NO: 19115 - RNA, 21 nt, Artificial Sequence
  SAMD9 targeting guide sequence portion
aaauuuugggaaugcuuccag

SEQ ID NO: 19116 - RNA, 21 nt, Artificial Sequence
  SAMD9 targeting guide sequence portion
aacaaucauuaauaaggauaa

SEQ ID NO: 19117 - RNA, 21 nt, Artificial Sequence
  SAMD9 targeting guide sequence portion
aacacacauuauagcaaacaa

SEQ ID NO: 19118 - RNA, 21 nt, Artificial Sequence
  SAMD9 targeting guide sequence portion
aacacacuuuucccacauaaa

SEQ ID NO: 19119 - RNA, 21 nt, Artificial Sequence
  SAMD9 targeting guide sequence portion
aacacaugaacacacuuuucc

SEQ ID NO: 19120 - RNA, 21 nt, Artificial Sequence
  SAMD9 targeting guide sequence portion
aacguucaauucugcuauaga

SEQ ID NO: 19121 - RNA, 21 nt, Artificial Sequence
  SAMD9 targeting guide sequence portion
aacguucuuaaauaauacagc

SEQ ID NO: 19122 - RNA, 21 nt, Artificial Sequence
  SAMD9 targeting guide sequence portion
aacuaaguacagaagcaaguu

SEQ ID NO: 19123 - RNA, 21 nt, Artificial Sequence
  SAMD9 targeting guide sequence portion
aacuaucucuauauauacuga

SEQ ID NO: 19124 - RNA, 21 nt, Artificial Sequence
  SAMD9 targeting guide sequence portion
aacuaugcuuaauacucauau

SEQ ID NO: 19125 - RNA, 21 nt, Artificial Sequence
  SAMD9 targeting guide sequence portion
aacuggcaauagucacauucu

SEQ ID NO: 19126 - RNA, 21 nt, Artificial Sequence
  SAMD9 targeting guide sequence portion
aacuugcuucuguacuuaguu

SEQ ID NO: 19127 - RNA, 21 nt, Artificial Sequence
  SAMD9 targeting guide sequence portion
aagaaacuggcaauagucaca

SEQ ID NO: 19128 - RNA, 21 nt, Artificial Sequence
  SAMD9 targeting guide sequence portion
aagaacguucaauucugcuau

SEQ ID NO: 19129 - RNA, 21 nt, Artificial Sequence
  SAMD9 targeting guide sequence portion
aagaaggauauuugaaacuaa

SEQ ID NO: 19130 - RNA, 21 nt, Artificial Sequence
  SAMD9 targeting guide sequence portion
aagaauaccaaauacaaacac

SEQ ID NO: 19131 - RNA, 21 nt, Artificial Sequence
  SAMD9 targeting guide sequence portion
aagagaaaaaagaaggauauu

SEQ ID NO: 19132 - RNA, 21 nt, Artificial Sequence
  SAMD9 targeting guide sequence portion
aagagaauuauguauaguaug

SEQ ID NO: 19133 - RNA, 21 nt, Artificial Sequence
  SAMD9 targeting guide sequence portion
aagagauaauucauuggcaua

SEQ ID NO: 19134 - RNA, 21 nt, Artificial Sequence
  SAMD9 targeting guide sequence portion
aagcaagagaauuauguauag

SEQ ID NO: 19135 - RNA, 21 nt, Artificial Sequence
  SAMD9 targeting guide sequence portion
aagcaaguuugugagauacau

SEQ ID NO: 19136 - RNA, 21 nt, Artificial Sequence
  SAMD9 targeting guide sequence portion
aagcauucccaaaauuuacuu

SEQ ID NO: 19137 - RNA, 21 nt, Artificial Sequence
  SAMD9 targeting guide sequence portion
aagcucaaaaggauaugccaa

SEQ ID NO: 19138 - RNA, 21 nt, Artificial Sequence
  SAMD9 targeting guide sequence portion
aaggauaaacuaucucuauau

SEQ ID NO: 19139 - RNA, 21 nt, Artificial Sequence
  SAMD9 targeting guide sequence portion
aaggauaugccaaugaauuau

SEQ ID NO: 19140 - RNA, 21 nt, Artificial Sequence
  SAMD9 targeting guide sequence portion
aaggauauuugaaacuaagua

SEQ ID NO: 19141 - RNA, 21 nt, Artificial Sequence
  SAMD9 targeting guide sequence portion
aaguaaauagagcauaugagu

SEQ ID NO: 19142 - RNA, 21 nt, Artificial Sequence
  SAMD9 targeting guide sequence portion
aaguaaauuuugggaaugcuu

SEQ ID NO: 19143 - RNA, 21 nt, Artificial Sequence
  SAMD9 targeting guide sequence portion
aaguacagaagcaaguuugug

SEQ ID NO: 19144 - RNA, 21 nt, Artificial Sequence
  SAMD9 targeting guide sequence portion
aaguguguucauguguuugua

SEQ ID NO: 19145 - RNA, 21 nt, Artificial Sequence
  SAMD9 targeting guide sequence portion
aaguuugugagauacaucaug

SEQ ID NO: 19146 - RNA, 21 nt, Artificial Sequence
  SAMD9 targeting guide sequence portion
aauaagagaaaaaagaaggau

SEQ ID NO: 19147 - RNA, 21 nt, Artificial Sequence
  SAMD9 targeting guide sequence portion
aauaauacagcaaacacacau

SEQ ID NO: 19148 - RNA, 21 nt, Artificial Sequence
  SAMD9 targeting guide sequence portion
aauacaaacacaugaacacac

SEQ ID NO: 19149 - RNA, 21 nt, Artificial Sequence
  SAMD9 targeting guide sequence portion
aauacagcaaacacacauuau

SEQ ID NO: 19150 - RNA, 21 nt, Artificial Sequence
  SAMD9 targeting guide sequence portion
aauaccaaauacaaacacaug

SEQ ID NO: 19151 - RNA, 21 nt, Artificial Sequence
  SAMD9 targeting guide sequence portion
aauacucauaugcucuauuua

SEQ ID NO: 19152 - RNA, 21 nt, Artificial Sequence
  SAMD9 targeting guide sequence portion
aauagagcauaugaguauuaa

SEQ ID NO: 19153 - RNA, 21 nt, Artificial Sequence
  SAMD9 targeting guide sequence portion
aauagucacauucucucaaga

SEQ ID NO: 19154 - RNA, 21 nt, Artificial Sequence
  SAMD9 targeting guide sequence portion
aauauccuucuuuuuucucuu

SEQ ID NO: 19155 - RNA, 21 nt, Artificial Sequence
  SAMD9 targeting guide sequence portion
aaucauuaauaaggauaaacu

SEQ ID NO: 19156 - RNA, 21 nt, Artificial Sequence
  SAMD9 targeting guide sequence portion
aaugaagcaagagaauuaugu

SEQ ID NO: 19157 - RNA, 21 nt, Artificial Sequence
  SAMD9 targeting guide sequence portion
aaugaauuaucucuugagaga

SEQ ID NO: 19158 - RNA, 21 nt, Artificial Sequence
  SAMD9 targeting guide sequence portion
aaugauuguuugcuauaaugu

SEQ ID NO: 19159 - RNA, 21 nt, Artificial Sequence
  SAMD9 targeting guide sequence portion
aaugcuuccagucaguauaua

SEQ ID NO: 19160 - RNA, 21 nt, Artificial Sequence
  SAMD9 targeting guide sequence portion
aaugugacuauugccaguuuc

SEQ ID NO: 19161 - RNA, 21 nt, Artificial Sequence
  SAMD9 targeting guide sequence portion
aauguguguuugcuguauuau

SEQ ID NO: 19162 - RNA, 21 nt, Artificial Sequence
  SAMD9 targeting guide sequence portion
aauuaucucuugagagaaugu

SEQ ID NO: 19163 - RNA, 21 nt, Artificial Sequence
  SAMD9 targeting guide sequence portion
aauuauguauaguaugccaca

SEQ ID NO: 19164 - RNA, 21 nt, Artificial Sequence
  SAMD9 targeting guide sequence portion
aauucauuggcauauccuuuu

SEQ ID NO: 19165 - RNA, 21 nt, Artificial Sequence
  SAMD9 targeting guide sequence portion
aauucucuugcuucauucacu

SEQ ID NO: 19166 - RNA, 21 nt, Artificial Sequence
  SAMD9 targeting guide sequence portion
aauucugcuauagaaaauaag

SEQ ID NO: 19167 - RNA, 21 nt, Artificial Sequence
  SAMD9 targeting guide sequence portion
aauugaacguucuuaaauaau

SEQ ID NO: 19168 - RNA, 21 nt, Artificial Sequence
  SAMD9 targeting guide sequence portion
aauuguggcauacuauacaua

SEQ ID NO: 19169 - RNA, 21 nt, Artificial Sequence
  SAMD9 targeting guide sequence portion
aauuuaaaaagcucaaaagga

SEQ ID NO: 19170 - RNA, 21 nt, Artificial Sequence
  SAMD9 targeting guide sequence portion
aauuuacuuagugaaugaagc

SEQ ID NO: 19171 - RNA, 21 nt, Artificial Sequence
  SAMD9 targeting guide sequence portion
aauuuaugugggaaaagugug

SEQ ID NO: 19172 - RNA, 21 nt, Artificial Sequence
  SAMD9 targeting guide sequence portion
aauuuugggaaugcuuccagu

SEQ ID NO: 19173 - RNA, 21 nt, Artificial Sequence
  SAMD9 targeting guide sequence portion
acaaacacaugaacacacuuu

SEQ ID NO: 19174 - RNA, 21 nt, Artificial Sequence
  SAMD9 targeting guide sequence portion
acaaacuugcuucuguacuua

SEQ ID NO: 19175 - RNA, 21 nt, Artificial Sequence
  SAMD9 targeting guide sequence portion
acaaucauuaauaaggauaaa

SEQ ID NO: 19176 - RNA, 21 nt, Artificial Sequence
  SAMD9 targeting guide sequence portion
acaauuuaugugggaaaagug

SEQ ID NO: 19177 - RNA, 21 nt, Artificial Sequence
  SAMD9 targeting guide sequence portion
acacacauuauagcaaacaau

SEQ ID NO: 19178 - RNA, 21 nt, Artificial Sequence
  SAMD9 targeting guide sequence portion
acacacuuuucccacauaaau

SEQ ID NO: 19179 - RNA, 21 nt, Artificial Sequence
  SAMD9 targeting guide sequence portion
acacaugaacacacuuuuccc

SEQ ID NO: 19180 - RNA, 21 nt, Artificial Sequence
  SAMD9 targeting guide sequence portion
acacauuauagcaaacaauca

SEQ ID NO: 19181 - RNA, 21 nt, Artificial Sequence
  SAMD9 targeting guide sequence portion
acacuuuucccacauaaauug

SEQ ID NO: 19182 - RNA, 21 nt, Artificial Sequence
  SAMD9 targeting guide sequence portion
acagaagcaaguuugugagau

SEQ ID NO: 19183 - RNA, 21 nt, Artificial Sequence
  SAMD9 targeting guide sequence portion
acagcaaacacacauuauagc

SEQ ID NO: 19184 - RNA, 21 nt, Artificial Sequence
  SAMD9 targeting guide sequence portion
acauaaauuguggcauacuau

SEQ ID NO: 19185 - RNA, 21 nt, Artificial Sequence
  SAMD9 targeting guide sequence portion
acauaauucucuugcuucauu

SEQ ID NO: 19186 - RNA, 21 nt, Artificial Sequence
  SAMD9 targeting guide sequence portion
acauagauaaaguaaauagag

SEQ ID NO: 19187 - RNA, 21 nt, Artificial Sequence
  SAMD9 targeting guide sequence portion
acaucaugauagacauagaua

SEQ ID NO: 19188 - RNA, 21 nt, Artificial Sequence
  SAMD9 targeting guide sequence portion
acaugaacacacuuuucccac

SEQ ID NO: 19189 - RNA, 21 nt, Artificial Sequence
  SAMD9 targeting guide sequence portion
acauuauagcaaacaaucauu

SEQ ID NO: 19190 - RNA, 21 nt, Artificial Sequence
  SAMD9 targeting guide sequence portion
acauucucucaagagauaauu

SEQ ID NO: 19191 - RNA, 21 nt, Artificial Sequence
  SAMD9 targeting guide sequence portion
accaaauacaaacacaugaac

SEQ ID NO: 19192 - RNA, 21 nt, Artificial Sequence
  SAMD9 targeting guide sequence portion
acguucaauucugcuauagaa

SEQ ID NO: 19193 - RNA, 21 nt, Artificial Sequence
  SAMD9 targeting guide sequence portion
acguucuuaaauaauacagca

SEQ ID NO: 19194 - RNA, 21 nt, Artificial Sequence
  SAMD9 targeting guide sequence portion
acuaaguaaauuuugggaaug

SEQ ID NO: 19195 - RNA, 21 nt, Artificial Sequence
  SAMD9 targeting guide sequence portion
acuaaguacagaagcaaguuu

SEQ ID NO: 19196 - RNA, 21 nt, Artificial Sequence
  SAMD9 targeting guide sequence portion
acuauacauaauucucuugcu

SEQ ID NO: 19197 - RNA, 21 nt, Artificial Sequence
  SAMD9 targeting guide sequence portion
acuaucucuauauauacugac

SEQ ID NO: 19198 - RNA, 21 nt, Artificial Sequence
  SAMD9 targeting guide sequence portion
acuaugcuuaauacucauaug

SEQ ID NO: 19199 - RNA, 21 nt, Artificial Sequence
  SAMD9 targeting guide sequence portion
acuauugccaguuucuucugc

SEQ ID NO: 19200 - RNA, 21 nt, Artificial Sequence
  SAMD9 targeting guide sequence portion
acucauaugcucuauuuacuu

SEQ ID NO: 19201 - RNA, 21 nt, Artificial Sequence
  SAMD9 targeting guide sequence portion
acugacuggaagcauucccaa

SEQ ID NO: 19202 - RNA, 21 nt, Artificial Sequence
  SAMD9 targeting guide sequence portion
acuggaagcauucccaaaauu

SEQ ID NO: 19203 - RNA, 21 nt, Artificial Sequence
  SAMD9 targeting guide sequence portion
acuggcaauagucacauucuc

SEQ ID NO: 19204 - RNA, 21 nt, Artificial Sequence
  SAMD9 targeting guide sequence portion
acuuagugaaugaagcaagag

SEQ ID NO: 19205 - RNA, 21 nt, Artificial Sequence
  SAMD9 targeting guide sequence portion
acuuaguuucaaauauccuuc

SEQ ID NO: 19206 - RNA, 21 nt, Artificial Sequence
  SAMD9 targeting guide sequence portion
acuugcuucuguacuuaguuu

SEQ ID NO: 19207 - RNA, 21 nt, Artificial Sequence
  SAMD9 targeting guide sequence portion
acuuuaucuaugucuaucaug

SEQ ID NO: 19208 - RNA, 21 nt, Artificial Sequence
  SAMD9 targeting guide sequence portion
acuuuucccacauaaauugug

SEQ ID NO: 19209 - RNA, 21 nt, Artificial Sequence
  SAMD9 targeting guide sequence portion
agaaaaaagaaggauauuuga

SEQ ID NO: 19210 - RNA, 21 nt, Artificial Sequence
  SAMD9 targeting guide sequence portion
agaaaauaagagaaaaaagaa

SEQ ID NO: 19211 - RNA, 21 nt, Artificial Sequence
  SAMD9 targeting guide sequence portion
agaaacuggcaauagucacau

SEQ ID NO: 19212 - RNA, 21 nt, Artificial Sequence
  SAMD9 targeting guide sequence portion
agaaagaauaccaaauacaaa

SEQ ID NO: 19213 - RNA, 21 nt, Artificial Sequence
  SAMD9 targeting guide sequence portion
agaacguucaauucugcuaua

SEQ ID NO: 19214 - RNA, 21 nt, Artificial Sequence
  SAMD9 targeting guide sequence portion
agaagaaacuggcaauaguca

SEQ ID NO: 19215 - RNA, 21 nt, Artificial Sequence
  SAMD9 targeting guide sequence portion
agaagcaaguuugugagauac

SEQ ID NO: 19216 - RNA, 21 nt, Artificial Sequence
  SAMD9 targeting guide sequence portion
agaaggauauuugaaacuaag

SEQ ID NO: 19217 - RNA, 21 nt, Artificial Sequence
  SAMD9 targeting guide sequence portion
agaauaccaaauacaaacaca

SEQ ID NO: 19218 - RNA, 21 nt, Artificial Sequence
  SAMD9 targeting guide sequence portion
agaaugugacuauugccaguu

SEQ ID NO: 19219 - RNA, 21 nt, Artificial Sequence
  SAMD9 targeting guide sequence portion
agaauuauguauaguaugcca

SEQ ID NO: 19220 - RNA, 21 nt, Artificial Sequence
  SAMD9 targeting guide sequence portion
agaauugaacguucuuaaaua

SEQ ID NO: 19221 - RNA, 21 nt, Artificial Sequence
  SAMD9 targeting guide sequence portion
agacauagauaaaguaaauag

SEQ ID NO: 19222 - RNA, 21 nt, Artificial Sequence
  SAMD9 targeting guide sequence portion
agagaaaaaagaaggauauuu

SEQ ID NO: 19223 - RNA, 21 nt, Artificial Sequence
  SAMD9 targeting guide sequence portion
agagaaagaauaccaaauaca

SEQ ID NO: 19224 - RNA, 21 nt, Artificial Sequence
  SAMD9 targeting guide sequence portion
agagaaugugacuauugccag

SEQ ID NO: 19225 - RNA, 21 nt, Artificial Sequence
  SAMD9 targeting guide sequence portion
agagaauuauguauaguaugc

SEQ ID NO: 19226 - RNA, 21 nt, Artificial Sequence
  SAMD9 targeting guide sequence portion
agagauaauucauuggcauau

SEQ ID NO: 19227 - RNA, 21 nt, Artificial Sequence
  SAMD9 targeting guide sequence portion
agagauaguuuauccuuauua

SEQ ID NO: 19228 - RNA, 21 nt, Artificial Sequence
  SAMD9 targeting guide sequence portion
agagcauaugaguauuaagca

SEQ ID NO: 19229 - RNA, 21 nt, Artificial Sequence
  SAMD9 targeting guide sequence portion
agauaaaguaaauagagcaua

SEQ ID NO: 19230 - RNA, 21 nt, Artificial Sequence
  SAMD9 targeting guide sequence portion
agauaauucauuggcauaucc

SEQ ID NO: 19231 - RNA, 21 nt, Artificial Sequence
  SAMD9 targeting guide sequence portion
agauacaucaugauagacaua

SEQ ID NO: 19232 - RNA, 21 nt, Artificial Sequence
  SAMD9 targeting guide sequence portion
agauaguuuauccuuauuaau

SEQ ID NO: 19233 - RNA, 21 nt, Artificial Sequence
  SAMD9 targeting guide sequence portion
agcaaacaaucauuaauaagg

SEQ ID NO: 19234 - RNA, 21 nt, Artificial Sequence
  SAMD9 targeting guide sequence portion
agcaaacacacauuauagcaa

SEQ ID NO: 19235 - RNA, 21 nt, Artificial Sequence
  SAMD9 targeting guide sequence portion
agcaagagaauuauguauagu

SEQ ID NO: 19236 - RNA, 21 nt, Artificial Sequence
  SAMD9 targeting guide sequence portion
agcaaguuugugagauacauc

SEQ ID NO: 19237 - RNA, 21 nt, Artificial Sequence
  SAMD9 targeting guide sequence portion
agcagaauugaacguucuuaa

SEQ ID NO: 19238 - RNA, 21 nt, Artificial Sequence
  SAMD9 targeting guide sequence portion
agcauaugaguauuaagcaua

SEQ ID NO: 19239 - RNA, 21 nt, Artificial Sequence
  SAMD9 targeting guide sequence portion
agcauucccaaaauuuacuua

SEQ ID NO: 19240 - RNA, 21 nt, Artificial Sequence
  SAMD9 targeting guide sequence portion
agcucaaaaggauaugccaau

SEQ ID NO: 19241 - RNA, 21 nt, Artificial Sequence
  SAMD9 targeting guide sequence portion
aggauaaacuaucucuauaua

SEQ ID NO: 19242 - RNA, 21 nt, Artificial Sequence
  SAMD9 targeting guide sequence portion
aggauaugccaaugaauuauc

SEQ ID NO: 19243 - RNA, 21 nt, Artificial Sequence
  SAMD9 targeting guide sequence portion
aggauauuugaaacuaaguac

SEQ ID NO: 19244 - RNA, 21 nt, Artificial Sequence
  SAMD9 targeting guide sequence portion
agggaugcagaagaaacuggc

SEQ ID NO: 19245 - RNA, 21 nt, Artificial Sequence
  SAMD9 targeting guide sequence portion
aguaaauagagcauaugagua

SEQ ID NO: 19246 - RNA, 21 nt, Artificial Sequence
  SAMD9 targeting guide sequence portion
aguaaauuuugggaaugcuuc

SEQ ID NO: 19247 - RNA, 21 nt, Artificial Sequence
  SAMD9 targeting guide sequence portion
aguacagaagcaaguuuguga

SEQ ID NO: 19248 - RNA, 21 nt, Artificial Sequence
  SAMD9 targeting guide sequence portion
aguauauauagagauaguuua

SEQ ID NO: 19249 - RNA, 21 nt, Artificial Sequence
  SAMD9 targeting guide sequence portion
aguaugccacaauuuaugugg

SEQ ID NO: 19250 - RNA, 21 nt, Artificial Sequence
  SAMD9 targeting guide sequence portion
agucacauucucucaagagau

SEQ ID NO: 19251 - RNA, 21 nt, Artificial Sequence
  SAMD9 targeting guide sequence portion
agucaguauauauagagauag

SEQ ID NO: 19252 - RNA, 21 nt, Artificial Sequence
  SAMD9 targeting guide sequence portion
agugaaugaagcaagagaauu

SEQ ID NO: 19253 - RNA, 21 nt, Artificial Sequence
  SAMD9 targeting guide sequence portion
aguguguucauguguuuguau

SEQ ID NO: 19254 - RNA, 21 nt, Artificial Sequence
  SAMD9 targeting guide sequence portion
aguuuauccuuauuaaugauu

SEQ ID NO: 19255 - RNA, 21 nt, Artificial Sequence
  SAMD9 targeting guide sequence portion
aguuucaaauauccuucuuuu

SEQ ID NO: 19256 - RNA, 21 nt, Artificial Sequence
  SAMD9 targeting guide sequence portion
aguuucuucugcaucccucca

SEQ ID NO: 19257 - RNA, 21 nt, Artificial Sequence
  SAMD9 targeting guide sequence portion
aguuugugagauacaucauga

SEQ ID NO: 19258 - RNA, 21 nt, Artificial Sequence
  SAMD9 targeting guide sequence portion
auaaacuaucucuauauauac

SEQ ID NO: 19259 - RNA, 21 nt, Artificial Sequence
  SAMD9 targeting guide sequence portion
auaaaguaaauagagcauaug

SEQ ID NO: 19260 - RNA, 21 nt, Artificial Sequence
  SAMD9 targeting guide sequence portion
auaaauuguggcauacuauac

SEQ ID NO: 19261 - RNA, 21 nt, Artificial Sequence
  SAMD9 targeting guide sequence portion
auaagagaaaaaagaaggaua

SEQ ID NO: 19262 - RNA, 21 nt, Artificial Sequence
  SAMD9 targeting guide sequence portion
auaaggauaaacuaucucuau

SEQ ID NO: 19263 - RNA, 21 nt, Artificial Sequence
  SAMD9 targeting guide sequence portion
auaauacagcaaacacacauu

SEQ ID NO: 19264 - RNA, 21 nt, Artificial Sequence
  SAMD9 targeting guide sequence portion
auaauguguguuugcuguauu

SEQ ID NO: 19265 - RNA, 21 nt, Artificial Sequence
  SAMD9 targeting guide sequence portion
auaauucauuggcauauccuu

SEQ ID NO: 19266 - RNA, 21 nt, Artificial Sequence
  SAMD9 targeting guide sequence portion
auaauucucuugcuucauuca

SEQ ID NO: 19267 - RNA, 21 nt, Artificial Sequence
  SAMD9 targeting guide sequence portion
auacaaacacaugaacacacu

SEQ ID NO: 19268 - RNA, 21 nt, Artificial Sequence
  SAMD9 targeting guide sequence portion
auacagcaaacacacauuaua

SEQ ID NO: 19269 - RNA, 21 nt, Artificial Sequence
  SAMD9 targeting guide sequence portion
auacauaauucucuugcuuca

SEQ ID NO: 19270 - RNA, 21 nt, Artificial Sequence
  SAMD9 targeting guide sequence portion
auacaucaugauagacauaga

SEQ ID NO: 19271 - RNA, 21 nt, Artificial Sequence
  SAMD9 targeting guide sequence portion
auaccaaauacaaacacauga

SEQ ID NO: 19272 - RNA, 21 nt, Artificial Sequence
  SAMD9 targeting guide sequence portion
auacuauacauaauucucuug

SEQ ID NO: 19273 - RNA, 21 nt, Artificial Sequence
  SAMD9 targeting guide sequence portion
auacucauaugcucuauuuac

SEQ ID NO: 19274 - RNA, 21 nt, Artificial Sequence
  SAMD9 targeting guide sequence portion
auacugacuggaagcauuccc

SEQ ID NO: 19275 - RNA, 21 nt, Artificial Sequence
  SAMD9 targeting guide sequence portion
auagaaaauaagagaaaaaag

SEQ ID NO: 19276 - RNA, 21 nt, Artificial Sequence
  SAMD9 targeting guide sequence portion
auagacauagauaaaguaaau

SEQ ID NO: 19277 - RNA, 21 nt, Artificial Sequence
  SAMD9 targeting guide sequence portion
auagagauaguuuauccuuau

SEQ ID NO: 19278 - RNA, 21 nt, Artificial Sequence
  SAMD9 targeting guide sequence portion
auagagcauaugaguauuaag

SEQ ID NO: 19279 - RNA, 21 nt, Artificial Sequence
  SAMD9 targeting guide sequence portion
auagauaaaguaaauagagca

SEQ ID NO: 19280 - RNA, 21 nt, Artificial Sequence
  SAMD9 targeting guide sequence portion
auagcaaacaaucauuaauaa

SEQ ID NO: 19281 - RNA, 21 nt, Artificial Sequence
  SAMD9 targeting guide sequence portion
auagcagaauugaacguucuu

SEQ ID NO: 19282 - RNA, 21 nt, Artificial Sequence
  SAMD9 targeting guide sequence portion
auaguaugccacaauuuaugu

SEQ ID NO: 19283 - RNA, 21 nt, Artificial Sequence
  SAMD9 targeting guide sequence portion
auagucacauucucucaagag

SEQ ID NO: 19284 - RNA, 21 nt, Artificial Sequence
  SAMD9 targeting guide sequence portion
auauacugacuggaagcauuc

SEQ ID NO: 19285 - RNA, 21 nt, Artificial Sequence
  SAMD9 targeting guide sequence portion
auauauacugacuggaagcau

SEQ ID NO: 19286 - RNA, 21 nt, Artificial Sequence
  SAMD9 targeting guide sequence portion
auauccuucuuuuuucucuua

SEQ ID NO: 19287 - RNA, 21 nt, Artificial Sequence
  SAMD9 targeting guide sequence portion
auauccuuuugagcuuuuuaa

SEQ ID NO: 19288 - RNA, 21 nt, Artificial Sequence
  SAMD9 targeting guide sequence portion
auaugaguauuaagcauaguu

SEQ ID NO: 19289 - RNA, 21 nt, Artificial Sequence
  SAMD9 targeting guide sequence portion
auaugccaaugaauuaucucu

SEQ ID NO: 19290 - RNA, 21 nt, Artificial Sequence
  SAMD9 targeting guide sequence portion
auaugcucuauuuacuuuauc

SEQ ID NO: 19291 - RNA, 21 nt, Artificial Sequence
  SAMD9 targeting guide sequence portion
auauuugaaacuaaguacaga

SEQ ID NO: 19292 - RNA, 21 nt, Artificial Sequence
  SAMD9 targeting guide sequence portion
aucaugauagacauagauaaa

SEQ ID NO: 19293 - RNA, 21 nt, Artificial Sequence
  SAMD9 targeting guide sequence portion
aucaugauguaucucacaaac

SEQ ID NO: 19294 - RNA, 21 nt, Artificial Sequence
  SAMD9 targeting guide sequence portion
aucauuaauaaggauaaacua

SEQ ID NO: 19295 - RNA, 21 nt, Artificial Sequence
  SAMD9 targeting guide sequence portion
aucccuccagagaaagaauac

SEQ ID NO: 19296 - RNA, 21 nt, Artificial Sequence
  SAMD9 targeting guide sequence portion
aucccuuucuaacuaugcuua

SEQ ID NO: 19297 - RNA, 21 nt, Artificial Sequence
  SAMD9 targeting guide sequence portion
auccuuauuaaugauuguuug

SEQ ID NO: 19298 - RNA, 21 nt, Artificial Sequence
  SAMD9 targeting guide sequence portion
auccuucuuuuuucucuuauu

SEQ ID NO: 19299 - RNA, 21 nt, Artificial Sequence
  SAMD9 targeting guide sequence portion
auccuuuugagcuuuuuaaau

SEQ ID NO: 19300 - RNA, 21 nt, Artificial Sequence
  SAMD9 targeting guide sequence portion
aucuaugucuaucaugaugua

SEQ ID NO: 19301 - RNA, 21 nt, Artificial Sequence
  SAMD9 targeting guide sequence portion
aucucacaaacuugcuucugu

SEQ ID NO: 19302 - RNA, 21 nt, Artificial Sequence
  SAMD9 targeting guide sequence portion
aucucuauauauacugacugg

SEQ ID NO: 19303 - RNA, 21 nt, Artificial Sequence
  SAMD9 targeting guide sequence portion
aucucuugagagaaugugacu

SEQ ID NO: 19304 - RNA, 21 nt, Artificial Sequence
  SAMD9 targeting guide sequence portion
augaacacacuuuucccacau

SEQ ID NO: 19305 - RNA, 21 nt, Artificial Sequence
  SAMD9 targeting guide sequence portion
augaagcaagagaauuaugua

SEQ ID NO: 19306 - RNA, 21 nt, Artificial Sequence
  SAMD9 targeting guide sequence portion
augaauuaucucuugagagaa

SEQ ID NO: 19307 - RNA, 21 nt, Artificial Sequence
  SAMD9 targeting guide sequence portion
augaguauuaagcauaguuag

SEQ ID NO: 19308 - RNA, 21 nt, Artificial Sequence
  SAMD9 targeting guide sequence portion
augauagacauagauaaagua

SEQ ID NO: 19309 - RNA, 21 nt, Artificial Sequence
  SAMD9 targeting guide sequence portion
augauguaucucacaaacuug

SEQ ID NO: 19310 - RNA, 21 nt, Artificial Sequence
  SAMD9 targeting guide sequence portion
augauuguuugcuauaaugug

SEQ ID NO: 19311 - RNA, 21 nt, Artificial Sequence
  SAMD9 targeting guide sequence portion
augcagaagaaacuggcaaua

SEQ ID NO: 19312 - RNA, 21 nt, Artificial Sequence
  SAMD9 targeting guide sequence portion
augccaaugaauuaucucuug

SEQ ID NO: 19313 - RNA, 21 nt, Artificial Sequence
  SAMD9 targeting guide sequence portion
augccacaauuuaugugggaa

SEQ ID NO: 19314 - RNA, 21 nt, Artificial Sequence
  SAMD9 targeting guide sequence portion
augcucuauuuacuuuaucua

SEQ ID NO: 19315 - RNA, 21 nt, Artificial Sequence
  SAMD9 targeting guide sequence portion
augcuuaauacucauaugcuc

SEQ ID NO: 19316 - RNA, 21 nt, Artificial Sequence
  SAMD9 targeting guide sequence portion
augcuuccagucaguauauau

SEQ ID NO: 19317 - RNA, 21 nt, Artificial Sequence
  SAMD9 targeting guide sequence portion
auguauaguaugccacaauuu

SEQ ID NO: 19318 - RNA, 21 nt, Artificial Sequence
  SAMD9 targeting guide sequence portion
auguaucucacaaacuugcuu

SEQ ID NO: 19319 - RNA, 21 nt, Artificial Sequence
  SAMD9 targeting guide sequence portion
augucuaucaugauguaucuc

SEQ ID NO: 19320 - RNA, 21 nt, Artificial Sequence
  SAMD9 targeting guide sequence portion
augugacuauugccaguuucu

SEQ ID NO: 19321 - RNA, 21 nt, Artificial Sequence
  SAMD9 targeting guide sequence portion
augugggaaaaguguguucau

SEQ ID NO: 19322 - RNA, 21 nt, Artificial Sequence
  SAMD9 targeting guide sequence portion
auguguguuugcuguauuauu

SEQ ID NO: 19323 - RNA, 21 nt, Artificial Sequence
  SAMD9 targeting guide sequence portion
auguguuuguauuugguauuc

SEQ ID NO: 19324 - RNA, 21 nt, Artificial Sequence
  SAMD9 targeting guide sequence portion
auuaaugauuguuugcuauaa

SEQ ID NO: 19325 - RNA, 21 nt, Artificial Sequence
  SAMD9 targeting guide sequence portion
auuauagcaaacaaucauuaa

SEQ ID NO: 19326 - RNA, 21 nt, Artificial Sequence
  SAMD9 targeting guide sequence portion
auuaucucuugagagaaugug

SEQ ID NO: 19327 - RNA, 21 nt, Artificial Sequence
  SAMD9 targeting guide sequence portion
auuauguauaguaugccacaa

SEQ ID NO: 19328 - RNA, 21 nt, Artificial Sequence
  SAMD9 targeting guide sequence portion
auuauuuaagaacguucaauu

SEQ ID NO: 19329 - RNA, 21 nt, Artificial Sequence
  SAMD9 targeting guide sequence portion
auucacuaaguaaauuuuggg

SEQ ID NO: 19330 - RNA, 21 nt, Artificial Sequence
  SAMD9 targeting guide sequence portion
auucauuggcauauccuuuug

SEQ ID NO: 19331 - RNA, 21 nt, Artificial Sequence
  SAMD9 targeting guide sequence portion
auucccaaaauuuacuuagug

SEQ ID NO: 19332 - RNA, 21 nt, Artificial Sequence
  SAMD9 targeting guide sequence portion
auucucucaagagauaauuca

SEQ ID NO: 19333 - RNA, 21 nt, Artificial Sequence
  SAMD9 targeting guide sequence portion
auucucuugcuucauucacua

SEQ ID NO: 19334 - RNA, 21 nt, Artificial Sequence
  SAMD9 targeting guide sequence portion
auucugcuauagaaaauaaga

SEQ ID NO: 19335 - RNA, 21 nt, Artificial Sequence
  SAMD9 targeting guide sequence portion
auucuuucucuggagggaugc

SEQ ID NO: 19336 - RNA, 21 nt, Artificial Sequence
  SAMD9 targeting guide sequence portion
auugaacguucuuaaauaaua

SEQ ID NO: 19337 - RNA, 21 nt, Artificial Sequence
  SAMD9 targeting guide sequence portion
auugccaguuucuucugcauc

SEQ ID NO: 19338 - RNA, 21 nt, Artificial Sequence
  SAMD9 targeting guide sequence portion
auuggcauauccuuuugagcu

SEQ ID NO: 19339 - RNA, 21 nt, Artificial Sequence
  SAMD9 targeting guide sequence portion
auuguggcauacuauacauaa

SEQ ID NO: 19340 - RNA, 21 nt, Artificial Sequence
  SAMD9 targeting guide sequence portion
auuguuugcuauaaugugugu

SEQ ID NO: 19341 - RNA, 21 nt, Artificial Sequence
  SAMD9 targeting guide sequence portion
auuuaaaaagcucaaaaggau

SEQ ID NO: 19342 - RNA, 21 nt, Artificial Sequence
  SAMD9 targeting guide sequence portion
auuuaagaacguucaauucug

SEQ ID NO: 19343 - RNA, 21 nt, Artificial Sequence
  SAMD9 targeting guide sequence portion
auuuacuuagugaaugaagca

SEQ ID NO: 19344 - RNA, 21 nt, Artificial Sequence
  SAMD9 targeting guide sequence portion
auuuacuuuaucuaugucuau

SEQ ID NO: 19345 - RNA, 21 nt, Artificial Sequence
  SAMD9 targeting guide sequence portion
auuuaugugggaaaagugugu

SEQ ID NO: 19346 - RNA, 21 nt, Artificial Sequence
  SAMD9 targeting guide sequence portion
auuugaaacuaaguacagaag

SEQ ID NO: 19347 - RNA, 21 nt, Artificial Sequence
  SAMD9 targeting guide sequence portion
auuugguauucuuucucugga

SEQ ID NO: 19348 - RNA, 21 nt, Artificial Sequence
  SAMD9 targeting guide sequence portion
auuuucuauagcagaauugaa

SEQ ID NO: 19349 - RNA, 21 nt, Artificial Sequence
  SAMD9 targeting guide sequence portion
auuuugggaaugcuuccaguc

SEQ ID NO: 19350 - RNA, 21 nt, Artificial Sequence
  SAMD9 targeting guide sequence portion
caaaaggauaugccaaugaau

SEQ ID NO: 19351 - RNA, 21 nt, Artificial Sequence
  SAMD9 targeting guide sequence portion
caaaauuuaaaaagcucaaaa

SEQ ID NO: 19352 - RNA, 21 nt, Artificial Sequence
  SAMD9 targeting guide sequence portion
caaaauuuacuuagugaauga

SEQ ID NO: 19353 - RNA, 21 nt, Artificial Sequence
  SAMD9 targeting guide sequence portion
caaacaaucauuaauaaggau

SEQ ID NO: 19354 - RNA, 21 nt, Artificial Sequence
  SAMD9 targeting guide sequence portion
caaacacacauuauagcaaac

SEQ ID NO: 19355 - RNA, 21 nt, Artificial Sequence
  SAMD9 targeting guide sequence portion
caaacacaugaacacacuuuu

SEQ ID NO: 19356 - RNA, 21 nt, Artificial Sequence
  SAMD9 targeting guide sequence portion
caaacuugcuucuguacuuag

SEQ ID NO: 19357 - RNA, 21 nt, Artificial Sequence
  SAMD9 targeting guide sequence portion
caaauacaaacacaugaacac

SEQ ID NO: 19358 - RNA, 21 nt, Artificial Sequence
  SAMD9 targeting guide sequence portion
caaauauccuucuuuuuucuc

SEQ ID NO: 19359 - RNA, 21 nt, Artificial Sequence
  SAMD9 targeting guide sequence portion
caagagaauuauguauaguau

SEQ ID NO: 19360 - RNA, 21 nt, Artificial Sequence
  SAMD9 targeting guide sequence portion
caagagauaauucauuggcau

SEQ ID NO: 19361 - RNA, 21 nt, Artificial Sequence
  SAMD9 targeting guide sequence portion
caaguuugugagauacaucau

SEQ ID NO: 19362 - RNA, 21 nt, Artificial Sequence
  SAMD9 targeting guide sequence portion
caauagucacauucucucaag

SEQ ID NO: 19363 - RNA, 21 nt, Artificial Sequence
  SAMD9 targeting guide sequence portion
caaucauuaauaaggauaaac

SEQ ID NO: 19364 - RNA, 21 nt, Artificial Sequence
  SAMD9 targeting guide sequence portion
caaugaauuaucucuugagag

SEQ ID NO: 19365 - RNA, 21 nt, Artificial Sequence
  SAMD9 targeting guide sequence portion
caauucugcuauagaaaauaa

SEQ ID NO: 19366 - RNA, 21 nt, Artificial Sequence
  SAMD9 targeting guide sequence portion
caauuuaugugggaaaagugu

SEQ ID NO: 19367 - RNA, 21 nt, Artificial Sequence
  SAMD9 targeting guide sequence portion
cacaaacuugcuucuguacuu

SEQ ID NO: 19368 - RNA, 21 nt, Artificial Sequence
  SAMD9 targeting guide sequence portion
cacaauuuaugugggaaaagu

SEQ ID NO: 19369 - RNA, 21 nt, Artificial Sequence
  SAMD9 targeting guide sequence portion
cacacauuauagcaaacaauc

SEQ ID NO: 19370 - RNA, 21 nt, Artificial Sequence
  SAMD9 targeting guide sequence portion
cacacuuuucccacauaaauu

SEQ ID NO: 19371 - RNA, 21 nt, Artificial Sequence
  SAMD9 targeting guide sequence portion
cacauaaauuguggcauacua

SEQ ID NO: 19372 - RNA, 21 nt, Artificial Sequence
  SAMD9 targeting guide sequence portion
cacaugaacacacuuuuccca

SEQ ID NO: 19373 - RNA, 21 nt, Artificial Sequence
  SAMD9 targeting guide sequence portion
cacauuauagcaaacaaucau

SEQ ID NO: 19374 - RNA, 21 nt, Artificial Sequence
  SAMD9 targeting guide sequence portion
cacauucucucaagagauaau

SEQ ID NO: 19375 - RNA, 21 nt, Artificial Sequence
  SAMD9 targeting guide sequence portion
cacuaaguaaauuuugggaau

SEQ ID NO: 19376 - RNA, 21 nt, Artificial Sequence
  SAMD9 targeting guide sequence portion
cacuuuucccacauaaauugu

SEQ ID NO: 19377 - RNA, 21 nt, Artificial Sequence
  SAMD9 targeting guide sequence portion
cagaagaaacuggcaauaguc

SEQ ID NO: 19378 - RNA, 21 nt, Artificial Sequence
  SAMD9 targeting guide sequence portion
cagaagcaaguuugugagaua

SEQ ID NO: 19379 - RNA, 21 nt, Artificial Sequence
  SAMD9 targeting guide sequence portion
cagaauugaacguucuuaaau

SEQ ID NO: 19380 - RNA, 21 nt, Artificial Sequence
  SAMD9 targeting guide sequence portion
cagagaaagaauaccaaauac

SEQ ID NO: 19381 - RNA, 21 nt, Artificial Sequence
  SAMD9 targeting guide sequence portion
cagcaaacacacauuauagca

SEQ ID NO: 19382 - RNA, 21 nt, Artificial Sequence
  SAMD9 targeting guide sequence portion
caguauauauagagauaguuu

SEQ ID NO: 19383 - RNA, 21 nt, Artificial Sequence
  SAMD9 targeting guide sequence portion
cagucaguauauauagagaua

SEQ ID NO: 19384 - RNA, 21 nt, Artificial Sequence
  SAMD9 targeting guide sequence portion
caguuucuucugcaucccucc

SEQ ID NO: 19385 - RNA, 21 nt, Artificial Sequence
  SAMD9 targeting guide sequence portion
cauaaauuguggcauacuaua

SEQ ID NO: 19386 - RNA, 21 nt, Artificial Sequence
  SAMD9 targeting guide sequence portion
cauaauucucuugcuucauuc

SEQ ID NO: 19387 - RNA, 21 nt, Artificial Sequence
  SAMD9 targeting guide sequence portion
cauacuauacauaauucucuu

SEQ ID NO: 19388 - RNA, 21 nt, Artificial Sequence
  SAMD9 targeting guide sequence portion
cauagauaaaguaaauagagc

SEQ ID NO: 19389 - RNA, 21 nt, Artificial Sequence
  SAMD9 targeting guide sequence portion
cauauccuuuugagcuuuuua

SEQ ID NO: 19390 - RNA, 21 nt, Artificial Sequence
  SAMD9 targeting guide sequence portion
cauaugaguauuaagcauagu

SEQ ID NO: 19391 - RNA, 21 nt, Artificial Sequence
  SAMD9 targeting guide sequence portion
cauaugcucuauuuacuuuau

SEQ ID NO: 19392 - RNA, 21 nt, Artificial Sequence
  SAMD9 targeting guide sequence portion
caucaugauagacauagauaa

SEQ ID NO: 19393 - RNA, 21 nt, Artificial Sequence
  SAMD9 targeting guide sequence portion
caucccuccagagaaagaaua

SEQ ID NO: 19394 - RNA, 21 nt, Artificial Sequence
  SAMD9 targeting guide sequence portion
caugaacacacuuuucccaca

SEQ ID NO: 19395 - RNA, 21 nt, Artificial Sequence
  SAMD9 targeting guide sequence portion
caugauagacauagauaaagu

SEQ ID NO: 19396 - RNA, 21 nt, Artificial Sequence
  SAMD9 targeting guide sequence portion
caugauguaucucacaaacuu

SEQ ID NO: 19397 - RNA, 21 nt, Artificial Sequence
  SAMD9 targeting guide sequence portion
cauguguuuguauuugguauu

SEQ ID NO: 19398 - RNA, 21 nt, Artificial Sequence
  SAMD9 targeting guide sequence portion
cauuaauaaggauaaacuauc

SEQ ID NO: 19399 - RNA, 21 nt, Artificial Sequence
  SAMD9 targeting guide sequence portion
cauuauagcaaacaaucauua

SEQ ID NO: 19400 - RNA, 21 nt, Artificial Sequence
  SAMD9 targeting guide sequence portion
cauucacuaaguaaauuuugg

SEQ ID NO: 19401 - RNA, 21 nt, Artificial Sequence
  SAMD9 targeting guide sequence portion
cauucccaaaauuuacuuagu

SEQ ID NO: 19402 - RNA, 21 nt, Artificial Sequence
  SAMD9 targeting guide sequence portion
cauucucucaagagauaauuc

SEQ ID NO: 19403 - RNA, 21 nt, Artificial Sequence
  SAMD9 targeting guide sequence portion
cauuggcauauccuuuugagc

SEQ ID NO: 19404 - RNA, 21 nt, Artificial Sequence
  SAMD9 targeting guide sequence portion
ccaaaauuuacuuagugaaug

SEQ ID NO: 19405 - RNA, 21 nt, Artificial Sequence
  SAMD9 targeting guide sequence portion
ccaaauacaaacacaugaaca

SEQ ID NO: 19406 - RNA, 21 nt, Artificial Sequence
  SAMD9 targeting guide sequence portion
ccaaugaauuaucucuugaga

SEQ ID NO: 19407 - RNA, 21 nt, Artificial Sequence
  SAMD9 targeting guide sequence portion
ccacaauuuaugugggaaaag

SEQ ID NO: 19408 - RNA, 21 nt, Artificial Sequence
  SAMD9 targeting guide sequence portion
ccacauaaauuguggcauacu

SEQ ID NO: 19409 - RNA, 21 nt, Artificial Sequence
  SAMD9 targeting guide sequence portion
ccagagaaagaauaccaaaua

SEQ ID NO: 19410 - RNA, 21 nt, Artificial Sequence
  SAMD9 targeting guide sequence portion
ccagucaguauauauagagau

SEQ ID NO: 19411 - RNA, 21 nt, Artificial Sequence
  SAMD9 targeting guide sequence portion
ccaguuucuucugcaucccuc

SEQ ID NO: 19412 - RNA, 21 nt, Artificial Sequence
  SAMD9 targeting guide sequence portion
cccaaaauuuacuuagugaau

SEQ ID NO: 19413 - RNA, 21 nt, Artificial Sequence
  SAMD9 targeting guide sequence portion
cccacauaaauuguggcauac

SEQ ID NO: 19414 - RNA, 21 nt, Artificial Sequence
  SAMD9 targeting guide sequence portion
cccuccagagaaagaauacca

SEQ ID NO: 19415 - RNA, 21 nt, Artificial Sequence
  SAMD9 targeting guide sequence portion
cccuuucuaacuaugcuuaau

SEQ ID NO: 19416 - RNA, 21 nt, Artificial Sequence
  SAMD9 targeting guide sequence portion
ccuccagagaaagaauaccaa

SEQ ID NO: 19417 - RNA, 21 nt, Artificial Sequence
  SAMD9 targeting guide sequence portion
ccuuauuaaugauuguuugcu

SEQ ID NO: 19418 - RNA, 21 nt, Artificial Sequence
  SAMD9 targeting guide sequence portion
ccuucuuuuuucucuuauuuu

SEQ ID NO: 19419 - RNA, 21 nt, Artificial Sequence
  SAMD9 targeting guide sequence portion
ccuuucuaacuaugcuuaaua

SEQ ID NO: 19420 - RNA, 21 nt, Artificial Sequence
  SAMD9 targeting guide sequence portion
ccuuuugagcuuuuuaaauuu

SEQ ID NO: 19421 - RNA, 21 nt, Artificial Sequence
  SAMD9 targeting guide sequence portion
cguucaauucugcuauagaaa

SEQ ID NO: 19422 - RNA, 21 nt, Artificial Sequence
  SAMD9 targeting guide sequence portion
cguucuuaaauaauacagcaa

SEQ ID NO: 19423 - RNA, 21 nt, Artificial Sequence
  SAMD9 targeting guide sequence portion
cuaacuaugcuuaauacucau

SEQ ID NO: 19424 - RNA, 21 nt, Artificial Sequence
  SAMD9 targeting guide sequence portion
cuaaguaaauuuugggaaugc

SEQ ID NO: 19425 - RNA, 21 nt, Artificial Sequence
  SAMD9 targeting guide sequence portion
cuaaguacagaagcaaguuug

SEQ ID NO: 19426 - RNA, 21 nt, Artificial Sequence
  SAMD9 targeting guide sequence portion
cuauaauguguguuugcugua

SEQ ID NO: 19427 - RNA, 21 nt, Artificial Sequence
  SAMD9 targeting guide sequence portion
cuauacauaauucucuugcuu

SEQ ID NO: 19428 - RNA, 21 nt, Artificial Sequence
  SAMD9 targeting guide sequence portion
cuauagaaaauaagagaaaaa

SEQ ID NO: 19429 - RNA, 21 nt, Artificial Sequence
  SAMD9 targeting guide sequence portion
cuauagcagaauugaacguuc

SEQ ID NO: 19430 - RNA, 21 nt, Artificial Sequence
  SAMD9 targeting guide sequence portion
cuauauauacugacuggaagc

SEQ ID NO: 19431 - RNA, 21 nt, Artificial Sequence
  SAMD9 targeting guide sequence portion
cuaucaugauguaucucacaa

SEQ ID NO: 19432 - RNA, 21 nt, Artificial Sequence
  SAMD9 targeting guide sequence portion
cuaucucuauauauacugacu

SEQ ID NO: 19433 - RNA, 21 nt, Artificial Sequence
  SAMD9 targeting guide sequence portion
cuaugcuuaauacucauaugc

SEQ ID NO: 19434 - RNA, 21 nt, Artificial Sequence
  SAMD9 targeting guide sequence portion
cuaugucuaucaugauguauc

SEQ ID NO: 19435 - RNA, 21 nt, Artificial Sequence
  SAMD9 targeting guide sequence portion
cuauugccaguuucuucugca

SEQ ID NO: 19436 - RNA, 21 nt, Artificial Sequence
  SAMD9 targeting guide sequence portion
cuauuuacuuuaucuaugucu

SEQ ID NO: 19437 - RNA, 21 nt, Artificial Sequence
  SAMD9 targeting guide sequence portion
cucaaaaggauaugccaauga

SEQ ID NO: 19438 - RNA, 21 nt, Artificial Sequence
  SAMD9 targeting guide sequence portion
cucaagagauaauucauuggc

SEQ ID NO: 19439 - RNA, 21 nt, Artificial Sequence
  SAMD9 targeting guide sequence portion
cucacaaacuugcuucuguac

SEQ ID NO: 19440 - RNA, 21 nt, Artificial Sequence
  SAMD9 targeting guide sequence portion
cucauaugcucuauuuacuuu

SEQ ID NO: 19441 - RNA, 21 nt, Artificial Sequence
  SAMD9 targeting guide sequence portion
cuccagagaaagaauaccaaa

SEQ ID NO: 19442 - RNA, 21 nt, Artificial Sequence
  SAMD9 targeting guide sequence portion
cucuauauauacugacuggaa

SEQ ID NO: 19443 - RNA, 21 nt, Artificial Sequence
  SAMD9 targeting guide sequence portion
cucuauuuacuuuaucuaugu

SEQ ID NO: 19444 - RNA, 21 nt, Artificial Sequence
  SAMD9 targeting guide sequence portion
cucucaagagauaauucauug

SEQ ID NO: 19445 - RNA, 21 nt, Artificial Sequence
  SAMD9 targeting guide sequence portion
cucuggagggaugcagaagaa

SEQ ID NO: 19446 - RNA, 21 nt, Artificial Sequence
  SAMD9 targeting guide sequence portion
cucuuauuuucuauagcagaa

SEQ ID NO: 19447 - RNA, 21 nt, Artificial Sequence
  SAMD9 targeting guide sequence portion
cucuugagagaaugugacuau

SEQ ID NO: 19448 - RNA, 21 nt, Artificial Sequence
  SAMD9 targeting guide sequence portion
cucuugcuucauucacuaagu

SEQ ID NO: 19449 - RNA, 21 nt, Artificial Sequence
  SAMD9 targeting guide sequence portion
cugacuggaagcauucccaaa

SEQ ID NO: 19450 - RNA, 21 nt, Artificial Sequence
  SAMD9 targeting guide sequence portion
cugcaucccuccagagaaaga

SEQ ID NO: 19451 - RNA, 21 nt, Artificial Sequence
  SAMD9 targeting guide sequence portion
cugcuauagaaaauaagagaa

SEQ ID NO: 19452 - RNA, 21 nt, Artificial Sequence
  SAMD9 targeting guide sequence portion
cuggaagcauucccaaaauuu

SEQ ID NO: 19453 - RNA, 21 nt, Artificial Sequence
  SAMD9 targeting guide sequence portion
cuggagggaugcagaagaaac

SEQ ID NO: 19454 - RNA, 21 nt, Artificial Sequence
  SAMD9 targeting guide sequence portion
cuggcaauagucacauucucu

SEQ ID NO: 19455 - RNA, 21 nt, Artificial Sequence
  SAMD9 targeting guide sequence portion
cuguacuuaguuucaaauauc

SEQ ID NO: 19456 - RNA, 21 nt, Artificial Sequence
  SAMD9 targeting guide sequence portion
cuguauuauuuaagaacguuc

SEQ ID NO: 19457 - RNA, 21 nt, Artificial Sequence
  SAMD9 targeting guide sequence portion
cuuaaauaauacagcaaacac

SEQ ID NO: 19458 - RNA, 21 nt, Artificial Sequence
  SAMD9 targeting guide sequence portion
cuuaauacucauaugcucuau

SEQ ID NO: 19459 - RNA, 21 nt, Artificial Sequence
  SAMD9 targeting guide sequence portion
cuuagugaaugaagcaagaga

SEQ ID NO: 19460 - RNA, 21 nt, Artificial Sequence
  SAMD9 targeting guide sequence portion
cuuaguuucaaauauccuucu

SEQ ID NO: 19461 - RNA, 21 nt, Artificial Sequence
  SAMD9 targeting guide sequence portion
cuuauuaaugauuguuugcua

SEQ ID NO: 19462 - RNA, 21 nt, Artificial Sequence
  SAMD9 targeting guide sequence portion
cuuauuuucuauagcagaauu

SEQ ID NO: 19463 - RNA, 21 nt, Artificial Sequence
  SAMD9 targeting guide sequence portion
cuucauucacuaaguaaauuu

SEQ ID NO: 19464 - RNA, 21 nt, Artificial Sequence
  SAMD9 targeting guide sequence portion
cuuccagucaguauauauaga

SEQ ID NO: 19465 - RNA, 21 nt, Artificial Sequence
  SAMD9 targeting guide sequence portion
cuucugcaucccuccagagaa

SEQ ID NO: 19466 - RNA, 21 nt, Artificial Sequence
  SAMD9 targeting guide sequence portion
cuucuguacuuaguuucaaau

SEQ ID NO: 19467 - RNA, 21 nt, Artificial Sequence
  SAMD9 targeting guide sequence portion
cuucuuuuuucucuuauuuuc

SEQ ID NO: 19468 - RNA, 21 nt, Artificial Sequence
  SAMD9 targeting guide sequence portion
cuugagagaaugugacuauug

SEQ ID NO: 19469 - RNA, 21 nt, Artificial Sequence
  SAMD9 targeting guide sequence portion
cuugcuucauucacuaaguaa

SEQ ID NO: 19470 - RNA, 21 nt, Artificial Sequence
  SAMD9 targeting guide sequence portion
cuugcuucuguacuuaguuuc

SEQ ID NO: 19471 - RNA, 21 nt, Artificial Sequence
  SAMD9 targeting guide sequence portion
cuuuaucuaugucuaucauga

SEQ ID NO: 19472 - RNA, 21 nt, Artificial Sequence
  SAMD9 targeting guide sequence portion
cuuucuaacuaugcuuaauac

SEQ ID NO: 19473 - RNA, 21 nt, Artificial Sequence
  SAMD9 targeting guide sequence portion
cuuucucuggagggaugcaga

SEQ ID NO: 19474 - RNA, 21 nt, Artificial Sequence
  SAMD9 targeting guide sequence portion
cuuuucccacauaaauugugg

SEQ ID NO: 19475 - RNA, 21 nt, Artificial Sequence
  SAMD9 targeting guide sequence portion
cuuuuuucucuuauuuucuau

SEQ ID NO: 19476 - RNA, 21 nt, Artificial Sequence
  SAMD9 targeting guide sequence portion
gaaaaaagaaggauauuugaa

SEQ ID NO: 19477 - RNA, 21 nt, Artificial Sequence
  SAMD9 targeting guide sequence portion
gaaaaguguguucauguguuu

SEQ ID NO: 19478 - RNA, 21 nt, Artificial Sequence
  SAMD9 targeting guide sequence portion
gaaaauaagagaaaaaagaag

SEQ ID NO: 19479 - RNA, 21 nt, Artificial Sequence
  SAMD9 targeting guide sequence portion
gaaacuaaguacagaagcaag

SEQ ID NO: 19480 - RNA, 21 nt, Artificial Sequence
  SAMD9 targeting guide sequence portion
gaaacuggcaauagucacauu

SEQ ID NO: 19481 - RNA, 21 nt, Artificial Sequence
  SAMD9 targeting guide sequence portion
gaaagaauaccaaauacaaac

SEQ ID NO: 19482 - RNA, 21 nt, Artificial Sequence
  SAMD9 targeting guide sequence portion
gaacacacuuuucccacauaa

SEQ ID NO: 19483 - RNA, 21 nt, Artificial Sequence
  SAMD9 targeting guide sequence portion
gaacguucaauucugcuauag

SEQ ID NO: 19484 - RNA, 21 nt, Artificial Sequence
  SAMD9 targeting guide sequence portion
gaacguucuuaaauaauacag

SEQ ID NO: 19485 - RNA, 21 nt, Artificial Sequence
  SAMD9 targeting guide sequence portion
gaagaaacuggcaauagucac

SEQ ID NO: 19486 - RNA, 21 nt, Artificial Sequence
  SAMD9 targeting guide sequence portion
gaagcaagagaauuauguaua

SEQ ID NO: 19487 - RNA, 21 nt, Artificial Sequence
  SAMD9 targeting guide sequence portion
gaagcaaguuugugagauaca

SEQ ID NO: 19488 - RNA, 21 nt, Artificial Sequence
  SAMD9 targeting guide sequence portion
gaagcauucccaaaauuuacu

SEQ ID NO: 19489 - RNA, 21 nt, Artificial Sequence
  SAMD9 targeting guide sequence portion
gaaggauauuugaaacuaagu

SEQ ID NO: 19490 - RNA, 21 nt, Artificial Sequence
  SAMD9 targeting guide sequence portion
gaauaccaaauacaaacacau

SEQ ID NO: 19491 - RNA, 21 nt, Artificial Sequence
  SAMD9 targeting guide sequence portion
gaaugaagcaagagaauuaug

SEQ ID NO: 19492 - RNA, 21 nt, Artificial Sequence
  SAMD9 targeting guide sequence portion
gaaugcuuccagucaguauau

SEQ ID NO: 19493 - RNA, 21 nt, Artificial Sequence
  SAMD9 targeting guide sequence portion
gaaugugacuauugccaguuu

SEQ ID NO: 19494 - RNA, 21 nt, Artificial Sequence
  SAMD9 targeting guide sequence portion
gaauuaucucuugagagaaug

SEQ ID NO: 19495 - RNA, 21 nt, Artificial Sequence
  SAMD9 targeting guide sequence portion
gaauuauguauaguaugccac

SEQ ID NO: 19496 - RNA, 21 nt, Artificial Sequence
  SAMD9 targeting guide sequence portion
gaauugaacguucuuaaauaa

SEQ ID NO: 19497 - RNA, 21 nt, Artificial Sequence
  SAMD9 targeting guide sequence portion
gacauagauaaaguaaauaga

SEQ ID NO: 19498 - RNA, 21 nt, Artificial Sequence
  SAMD9 targeting guide sequence portion
gacuauugccaguuucuucug

SEQ ID NO: 19499 - RNA, 21 nt, Artificial Sequence
  SAMD9 targeting guide sequence portion
gacuggaagcauucccaaaau

SEQ ID NO: 19500 - RNA, 21 nt, Artificial Sequence
  SAMD9 targeting guide sequence portion
gagaaaaaagaaggauauuug

SEQ ID NO: 19501 - RNA, 21 nt, Artificial Sequence
  SAMD9 targeting guide sequence portion
gagaaagaauaccaaauacaa

SEQ ID NO: 19502 - RNA, 21 nt, Artificial Sequence
  SAMD9 targeting guide sequence portion
gagaaugugacuauugccagu

SEQ ID NO: 19503 - RNA, 21 nt, Artificial Sequence
  SAMD9 targeting guide sequence portion
gagaauuauguauaguaugcc

SEQ ID NO: 19504 - RNA, 21 nt, Artificial Sequence
  SAMD9 targeting guide sequence portion
gagagaaugugacuauugcca

SEQ ID NO: 19505 - RNA, 21 nt, Artificial Sequence
  SAMD9 targeting guide sequence portion
gagauaauucauuggcauauc

SEQ ID NO: 19506 - RNA, 21 nt, Artificial Sequence
  SAMD9 targeting guide sequence portion
gagauacaucaugauagacau

SEQ ID NO: 19507 - RNA, 21 nt, Artificial Sequence
  SAMD9 targeting guide sequence portion
gagauaguuuauccuuauuaa

SEQ ID NO: 19508 - RNA, 21 nt, Artificial Sequence
  SAMD9 targeting guide sequence portion
gagcauaugaguauuaagcau

SEQ ID NO: 19509 - RNA, 21 nt, Artificial Sequence
  SAMD9 targeting guide sequence portion
gagggaugcagaagaaacugg

SEQ ID NO: 19510 - RNA, 21 nt, Artificial Sequence
  SAMD9 targeting guide sequence portion
gaguauuaagcauaguuagaa

SEQ ID NO: 19511 - RNA, 21 nt, Artificial Sequence
  SAMD9 targeting guide sequence portion
gauaaacuaucucuauauaua

SEQ ID NO: 19512 - RNA, 21 nt, Artificial Sequence
  SAMD9 targeting guide sequence portion
gauaaaguaaauagagcauau

SEQ ID NO: 19513 - RNA, 21 nt, Artificial Sequence
  SAMD9 targeting guide sequence portion
gauaauucauuggcauauccu

SEQ ID NO: 19514 - RNA, 21 nt, Artificial Sequence
  SAMD9 targeting guide sequence portion
gauacaucaugauagacauag

SEQ ID NO: 19515 - RNA, 21 nt, Artificial Sequence
  SAMD9 targeting guide sequence portion
gauagacauagauaaaguaaa

SEQ ID NO: 19516 - RNA, 21 nt, Artificial Sequence
  SAMD9 targeting guide sequence portion
gauaguuuauccuuauuaaug

SEQ ID NO: 19517 - RNA, 21 nt, Artificial Sequence
  SAMD9 targeting guide sequence portion
gauaugccaaugaauuaucuc

SEQ ID NO: 19518 - RNA, 21 nt, Artificial Sequence
  SAMD9 targeting guide sequence portion
gauauuugaaacuaaguacag

SEQ ID NO: 19519 - RNA, 21 nt, Artificial Sequence
  SAMD9 targeting guide sequence portion
gaugcagaagaaacuggcaau

SEQ ID NO: 19520 - RNA, 21 nt, Artificial Sequence
  SAMD9 targeting guide sequence portion
gauguaucucacaaacuugcu

SEQ ID NO: 19521 - RNA, 21 nt, Artificial Sequence
  SAMD9 targeting guide sequence portion
gauuguuugcuauaaugugug

SEQ ID NO: 19522 - RNA, 21 nt, Artificial Sequence
  SAMD9 targeting guide sequence portion
gcaaacaaucauuaauaagga

SEQ ID NO: 19523 - RNA, 21 nt, Artificial Sequence
  SAMD9 targeting guide sequence portion
gcaaacacacauuauagcaaa

SEQ ID NO: 19524 - RNA, 21 nt, Artificial Sequence
  SAMD9 targeting guide sequence portion
gcaagagaauuauguauagua

SEQ ID NO: 19525 - RNA, 21 nt, Artificial Sequence
  SAMD9 targeting guide sequence portion
gcaaguuugugagauacauca

SEQ ID NO: 19526 - RNA, 21 nt, Artificial Sequence
  SAMD9 targeting guide sequence portion
gcaauagucacauucucucaa

SEQ ID NO: 19527 - RNA, 21 nt, Artificial Sequence
  SAMD9 targeting guide sequence portion
gcagaagaaacuggcaauagu

SEQ ID NO: 19528 - RNA, 21 nt, Artificial Sequence
  SAMD9 targeting guide sequence portion
gcagaauugaacguucuuaaa

SEQ ID NO: 19529 - RNA, 21 nt, Artificial Sequence
  SAMD9 targeting guide sequence portion
gcauacuauacauaauucucu

SEQ ID NO: 19530 - RNA, 21 nt, Artificial Sequence
  SAMD9 targeting guide sequence portion
gcauauccuuuugagcuuuuu

SEQ ID NO: 19531 - RNA, 21 nt, Artificial Sequence
  SAMD9 targeting guide sequence portion
gcauaugaguauuaagcauag

SEQ ID NO: 19532 - RNA, 21 nt, Artificial Sequence
  SAMD9 targeting guide sequence portion
gcaucccuccagagaaagaau

SEQ ID NO: 19533 - RNA, 21 nt, Artificial Sequence
  SAMD9 targeting guide sequence portion
gcauucccaaaauuuacuuag

SEQ ID NO: 19534 - RNA, 21 nt, Artificial Sequence
  SAMD9 targeting guide sequence portion
gccaaugaauuaucucuugag

SEQ ID NO: 19535 - RNA, 21 nt, Artificial Sequence
  SAMD9 targeting guide sequence portion
gccacaauuuaugugggaaaa

SEQ ID NO: 19536 - RNA, 21 nt, Artificial Sequence
  SAMD9 targeting guide sequence portion
gccaguuucuucugcaucccu

SEQ ID NO: 19537 - RNA, 21 nt, Artificial Sequence
  SAMD9 targeting guide sequence portion
gcuauaauguguguuugcugu

SEQ ID NO: 19538 - RNA, 21 nt, Artificial Sequence
  SAMD9 targeting guide sequence portion
gcuauagaaaauaagagaaaa

SEQ ID NO: 19539 - RNA, 21 nt, Artificial Sequence
  SAMD9 targeting guide sequence portion
gcucaaaaggauaugccaaug

SEQ ID NO: 19540 - RNA, 21 nt, Artificial Sequence
  SAMD9 targeting guide sequence portion
gcucuauuuacuuuaucuaug

SEQ ID NO: 19541 - RNA, 21 nt, Artificial Sequence
  SAMD9 targeting guide sequence portion
gcuguauuauuuaagaacguu

SEQ ID NO: 19542 - RNA, 21 nt, Artificial Sequence
  SAMD9 targeting guide sequence portion
gcuuaauacucauaugcucua

SEQ ID NO: 19543 - RNA, 21 nt, Artificial Sequence
  SAMD9 targeting guide sequence portion
gcuucauucacuaaguaaauu

SEQ ID NO: 19544 - RNA, 21 nt, Artificial Sequence
  SAMD9 targeting guide sequence portion
gcuuccagucaguauauauag

SEQ ID NO: 19545 - RNA, 21 nt, Artificial Sequence
  SAMD9 targeting guide sequence portion
gcuucuguacuuaguuucaaa

SEQ ID NO: 19546 - RNA, 21 nt, Artificial Sequence
  SAMD9 targeting guide sequence portion
ggaaaaguguguucauguguu

SEQ ID NO: 19547 - RNA, 21 nt, Artificial Sequence
  SAMD9 targeting guide sequence portion
ggaagcauucccaaaauuuac

SEQ ID NO: 19548 - RNA, 21 nt, Artificial Sequence
  SAMD9 targeting guide sequence portion
ggaaugcuuccagucaguaua

SEQ ID NO: 19549 - RNA, 21 nt, Artificial Sequence
  SAMD9 targeting guide sequence portion
ggagggaugcagaagaaacug

SEQ ID NO: 19550 - RNA, 21 nt, Artificial Sequence
  SAMD9 targeting guide sequence portion
ggauaaacuaucucuauauau

SEQ ID NO: 19551 - RNA, 21 nt, Artificial Sequence
  SAMD9 targeting guide sequence portion
ggauaugccaaugaauuaucu

SEQ ID NO: 19552 - RNA, 21 nt, Artificial Sequence
  SAMD9 targeting guide sequence portion
ggauauuugaaacuaaguaca

SEQ ID NO: 19553 - RNA, 21 nt, Artificial Sequence
  SAMD9 targeting guide sequence portion
ggaugcagaagaaacuggcaa

SEQ ID NO: 19554 - RNA, 21 nt, Artificial Sequence
  SAMD9 targeting guide sequence portion
ggcaauagucacauucucuca

SEQ ID NO: 19555 - RNA, 21 nt, Artificial Sequence
  SAMD9 targeting guide sequence portion
ggcauacuauacauaauucuc

SEQ ID NO: 19556 - RNA, 21 nt, Artificial Sequence
  SAMD9 targeting guide sequence portion
ggcauauccuuuugagcuuuu

SEQ ID NO: 19557 - RNA, 21 nt, Artificial Sequence
  SAMD9 targeting guide sequence portion
gggaaaaguguguucaugugu

SEQ ID NO: 19558 - RNA, 21 nt, Artificial Sequence
  SAMD9 targeting guide sequence portion
gggaaugcuuccagucaguau

SEQ ID NO: 19559 - RNA, 21 nt, Artificial Sequence
  SAMD9 targeting guide sequence portion
gggaugcagaagaaacuggca

SEQ ID NO: 19560 - RNA, 21 nt, Artificial Sequence
  SAMD9 targeting guide sequence portion
gguauucuuucucuggaggga

SEQ ID NO: 19561 - RNA, 21 nt, Artificial Sequence
  SAMD9 targeting guide sequence portion
guaaauagagcauaugaguau

SEQ ID NO: 19562 - RNA, 21 nt, Artificial Sequence
  SAMD9 targeting guide sequence portion
guaaauuuugggaaugcuucc

SEQ ID NO: 19563 - RNA, 21 nt, Artificial Sequence
  SAMD9 targeting guide sequence portion
guacagaagcaaguuugugag

SEQ ID NO: 19564 - RNA, 21 nt, Artificial Sequence
  SAMD9 targeting guide sequence portion
guacuuaguuucaaauauccu

SEQ ID NO: 19565 - RNA, 21 nt, Artificial Sequence
  SAMD9 targeting guide sequence portion
guauaguaugccacaauuuau

SEQ ID NO: 19566 - RNA, 21 nt, Artificial Sequence
  SAMD9 targeting guide sequence portion
guauauauagagauaguuuau

SEQ ID NO: 19567 - RNA, 21 nt, Artificial Sequence
  SAMD9 targeting guide sequence portion
guaucucacaaacuugcuucu

SEQ ID NO: 19568 - RNA, 21 nt, Artificial Sequence
  SAMD9 targeting guide sequence portion
guaugccacaauuuauguggg

SEQ ID NO: 19569 - RNA, 21 nt, Artificial Sequence
  SAMD9 targeting guide sequence portion
guauuauuuaagaacguucaa

SEQ ID NO: 19570 - RNA, 21 nt, Artificial Sequence
  SAMD9 targeting guide sequence portion
guauucuuucucuggagggau

SEQ ID NO: 19571 - RNA, 21 nt, Artificial Sequence
  SAMD9 targeting guide sequence portion
guauuugguauucuuucucug

SEQ ID NO: 19572 - RNA, 21 nt, Artificial Sequence
  SAMD9 targeting guide sequence portion
gucacauucucucaagagaua

SEQ ID NO: 19573 - RNA, 21 nt, Artificial Sequence
  SAMD9 targeting guide sequence portion
gucaguauauauagagauagu

SEQ ID NO: 19574 - RNA, 21 nt, Artificial Sequence
  SAMD9 targeting guide sequence portion
gucuaucaugauguaucucac

SEQ ID NO: 19575 - RNA, 21 nt, Artificial Sequence
  SAMD9 targeting guide sequence portion
gugaaugaagcaagagaauua

SEQ ID NO: 19576 - RNA, 21 nt, Artificial Sequence
  SAMD9 targeting guide sequence portion
gugacuauugccaguuucuuc

SEQ ID NO: 19577 - RNA, 21 nt, Artificial Sequence
  SAMD9 targeting guide sequence portion
gugagauacaucaugauagac

SEQ ID NO: 19578 - RNA, 21 nt, Artificial Sequence
  SAMD9 targeting guide sequence portion
guggcauacuauacauaauuc

SEQ ID NO: 19579 - RNA, 21 nt, Artificial Sequence
  SAMD9 targeting guide sequence portion
gugggaaaaguguguucaugu

SEQ ID NO: 19580 - RNA, 21 nt, Artificial Sequence
  SAMD9 targeting guide sequence portion
guguguucauguguuuguauu

SEQ ID NO: 19581 - RNA, 21 nt, Artificial Sequence
  SAMD9 targeting guide sequence portion
guguguuugcuguauuauuua

SEQ ID NO: 19582 - RNA, 21 nt, Artificial Sequence
  SAMD9 targeting guide sequence portion
guguucauguguuuguauuug

SEQ ID NO: 19583 - RNA, 21 nt, Artificial Sequence
  SAMD9 targeting guide sequence portion
guguuugcuguauuauuuaag

SEQ ID NO: 19584 - RNA, 21 nt, Artificial Sequence
  SAMD9 targeting guide sequence portion
guguuuguauuugguauucuu

SEQ ID NO: 19585 - RNA, 21 nt, Artificial Sequence
  SAMD9 targeting guide sequence portion
guucaauucugcuauagaaaa

SEQ ID NO: 19586 - RNA, 21 nt, Artificial Sequence
  SAMD9 targeting guide sequence portion
guucauguguuuguauuuggu

SEQ ID NO: 19587 - RNA, 21 nt, Artificial Sequence
  SAMD9 targeting guide sequence portion
guucuuaaauaauacagcaaa

SEQ ID NO: 19588 - RNA, 21 nt, Artificial Sequence
  SAMD9 targeting guide sequence portion
guuuauccuuauuaaugauug

SEQ ID NO: 19589 - RNA, 21 nt, Artificial Sequence
  SAMD9 targeting guide sequence portion
guuucaaauauccuucuuuuu

SEQ ID NO: 19590 - RNA, 21 nt, Artificial Sequence
  SAMD9 targeting guide sequence portion
guuucuucugcaucccuccag

SEQ ID NO: 19591 - RNA, 21 nt, Artificial Sequence
  SAMD9 targeting guide sequence portion
guuugcuauaauguguguuug

SEQ ID NO: 19592 - RNA, 21 nt, Artificial Sequence
  SAMD9 targeting guide sequence portion
guuugcuguauuauuuaagaa

SEQ ID NO: 19593 - RNA, 21 nt, Artificial Sequence
  SAMD9 targeting guide sequence portion
guuuguauuugguauucuuuc

SEQ ID NO: 19594 - RNA, 21 nt, Artificial Sequence
  SAMD9 targeting guide sequence portion
guuugugagauacaucaugau

SEQ ID NO: 19595 - RNA, 21 nt, Artificial Sequence
  SAMD9 targeting guide sequence portion
uaaaaagcucaaaaggauaug

SEQ ID NO: 19596 - RNA, 21 nt, Artificial Sequence
  SAMD9 targeting guide sequence portion
uaaacuaucucuauauauacu

SEQ ID NO: 19597 - RNA, 21 nt, Artificial Sequence
  SAMD9 targeting guide sequence portion
uaaaguaaauagagcauauga

SEQ ID NO: 19598 - RNA, 21 nt, Artificial Sequence
  SAMD9 targeting guide sequence portion
uaaauaauacagcaaacacac

SEQ ID NO: 19599 - RNA, 21 nt, Artificial Sequence
  SAMD9 targeting guide sequence portion
uaaauagagcauaugaguauu

SEQ ID NO: 19600 - RNA, 21 nt, Artificial Sequence
  SAMD9 targeting guide sequence portion
uaaauuguggcauacuauaca

SEQ ID NO: 19601 - RNA, 21 nt, Artificial Sequence
  SAMD9 targeting guide sequence portion
uaaauuuugggaaugcuucca

SEQ ID NO: 19602 - RNA, 21 nt, Artificial Sequence
  SAMD9 targeting guide sequence portion
uaacuaugcuuaauacucaua

SEQ ID NO: 19603 - RNA, 21 nt, Artificial Sequence
  SAMD9 targeting guide sequence portion
uaagaacguucaauucugcua

SEQ ID NO: 19604 - RNA, 21 nt, Artificial Sequence
  SAMD9 targeting guide sequence portion
uaagagaaaaaagaaggauau

SEQ ID NO: 19605 - RNA, 21 nt, Artificial Sequence
  SAMD9 targeting guide sequence portion
uaaggauaaacuaucucuaua

SEQ ID NO: 19606 - RNA, 21 nt, Artificial Sequence
  SAMD9 targeting guide sequence portion
uaaguaaauuuugggaaugcu

SEQ ID NO: 19607 - RNA, 21 nt, Artificial Sequence
  SAMD9 targeting guide sequence portion
uaaguacagaagcaaguuugu

SEQ ID NO: 19608 - RNA, 21 nt, Artificial Sequence
  SAMD9 targeting guide sequence portion
uaauacagcaaacacacauua

SEQ ID NO: 19609 - RNA, 21 nt, Artificial Sequence
  SAMD9 targeting guide sequence portion
uaauacucauaugcucuauuu

SEQ ID NO: 19610 - RNA, 21 nt, Artificial Sequence
  SAMD9 targeting guide sequence portion
uaaugauuguuugcuauaaug

SEQ ID NO: 19611 - RNA, 21 nt, Artificial Sequence
  SAMD9 targeting guide sequence portion
uaauguguguuugcuguauua

SEQ ID NO: 19612 - RNA, 21 nt, Artificial Sequence
  SAMD9 targeting guide sequence portion
uaauucauuggcauauccuuu

SEQ ID NO: 19613 - RNA, 21 nt, Artificial Sequence
  SAMD9 targeting guide sequence portion
uaauucucuugcuucauucac

SEQ ID NO: 19614 - RNA, 21 nt, Artificial Sequence
  SAMD9 targeting guide sequence portion
uacaaacacaugaacacacuu

SEQ ID NO: 19615 - RNA, 21 nt, Artificial Sequence
  SAMD9 targeting guide sequence portion
uacagaagcaaguuugugaga

SEQ ID NO: 19616 - RNA, 21 nt, Artificial Sequence
  SAMD9 targeting guide sequence portion
uacagcaaacacacauuauag

SEQ ID NO: 19617 - RNA, 21 nt, Artificial Sequence
  SAMD9 targeting guide sequence portion
uacauaauucucuugcuucau

SEQ ID NO: 19618 - RNA, 21 nt, Artificial Sequence
  SAMD9 targeting guide sequence portion
uacaucaugauagacauagau

SEQ ID NO: 19619 - RNA, 21 nt, Artificial Sequence
  SAMD9 targeting guide sequence portion
uaccaaauacaaacacaugaa

SEQ ID NO: 19620 - RNA, 21 nt, Artificial Sequence
  SAMD9 targeting guide sequence portion
uacuauacauaauucucuugc

SEQ ID NO: 19621 - RNA, 21 nt, Artificial Sequence
  SAMD9 targeting guide sequence portion
uacucauaugcucuauuuacu

SEQ ID NO: 19622 - RNA, 21 nt, Artificial Sequence
  SAMD9 targeting guide sequence portion
uacugacuggaagcauuccca

SEQ ID NO: 19623 - RNA, 21 nt, Artificial Sequence
  SAMD9 targeting guide sequence portion
uacuuagugaaugaagcaaga

SEQ ID NO: 19624 - RNA, 21 nt, Artificial Sequence
  SAMD9 targeting guide sequence portion
uacuuaguuucaaauauccuu

SEQ ID NO: 19625 - RNA, 21 nt, Artificial Sequence
  SAMD9 targeting guide sequence portion
uacuuuaucuaugucuaucau

SEQ ID NO: 19626 - RNA, 21 nt, Artificial Sequence
  SAMD9 targeting guide sequence portion
uagaaaauaagagaaaaaaga

SEQ ID NO: 19627 - RNA, 21 nt, Artificial Sequence
  SAMD9 targeting guide sequence portion
uagacauagauaaaguaaaua

SEQ ID NO: 19628 - RNA, 21 nt, Artificial Sequence
  SAMD9 targeting guide sequence portion
uagagauaguuuauccuuauu

SEQ ID NO: 19629 - RNA, 21 nt, Artificial Sequence
  SAMD9 targeting guide sequence portion
uagagcauaugaguauuaagc

SEQ ID NO: 19630 - RNA, 21 nt, Artificial Sequence
  SAMD9 targeting guide sequence portion
uagauaaaguaaauagagcau

SEQ ID NO: 19631 - RNA, 21 nt, Artificial Sequence
  SAMD9 targeting guide sequence portion
uagcaaacaaucauuaauaag

SEQ ID NO: 19632 - RNA, 21 nt, Artificial Sequence
  SAMD9 targeting guide sequence portion
uagcagaauugaacguucuua

SEQ ID NO: 19633 - RNA, 21 nt, Artificial Sequence
  SAMD9 targeting guide sequence portion
uaguaugccacaauuuaugug

SEQ ID NO: 19634 - RNA, 21 nt, Artificial Sequence
  SAMD9 targeting guide sequence portion
uagucacauucucucaagaga

SEQ ID NO: 19635 - RNA, 21 nt, Artificial Sequence
  SAMD9 targeting guide sequence portion
uagugaaugaagcaagagaau

SEQ ID NO: 19636 - RNA, 21 nt, Artificial Sequence
  SAMD9 targeting guide sequence portion
uaguuuauccuuauuaaugau

SEQ ID NO: 19637 - RNA, 21 nt, Artificial Sequence
  SAMD9 targeting guide sequence portion
uaguuucaaauauccuucuuu

SEQ ID NO: 19638 - RNA, 21 nt, Artificial Sequence
  SAMD9 targeting guide sequence portion
uauaauguguguuugcuguau

SEQ ID NO: 19639 - RNA, 21 nt, Artificial Sequence
  SAMD9 targeting guide sequence portion
uauacauaauucucuugcuuc

SEQ ID NO: 19640 - RNA, 21 nt, Artificial Sequence
  SAMD9 targeting guide sequence portion
uauacugacuggaagcauucc

SEQ ID NO: 19641 - RNA, 21 nt, Artificial Sequence
  SAMD9 targeting guide sequence portion
uauagaaaauaagagaaaaaa

SEQ ID NO: 19642 - RNA, 21 nt, Artificial Sequence
  SAMD9 targeting guide sequence portion
uauagagauaguuuauccuua

SEQ ID NO: 19643 - RNA, 21 nt, Artificial Sequence
  SAMD9 targeting guide sequence portion
uauagcaaacaaucauuaaua

SEQ ID NO: 19644 - RNA, 21 nt, Artificial Sequence
  SAMD9 targeting guide sequence portion
uauagcagaauugaacguucu

SEQ ID NO: 19645 - RNA, 21 nt, Artificial Sequence
  SAMD9 targeting guide sequence portion
uauaguaugccacaauuuaug

SEQ ID NO: 19646 - RNA, 21 nt, Artificial Sequence
  SAMD9 targeting guide sequence portion
uauauacugacuggaagcauu

SEQ ID NO: 19647 - RNA, 21 nt, Artificial Sequence
  SAMD9 targeting guide sequence portion
uauauauacugacuggaagca

SEQ ID NO: 19648 - RNA, 21 nt, Artificial Sequence
  SAMD9 targeting guide sequence portion
uaucaugauguaucucacaaa

SEQ ID NO: 19649 - RNA, 21 nt, Artificial Sequence
  SAMD9 targeting guide sequence portion
uauccuuauuaaugauuguuu

SEQ ID NO: 19650 - RNA, 21 nt, Artificial Sequence
  SAMD9 targeting guide sequence portion
uauccuucuuuuuucucuuau

SEQ ID NO: 19651 - RNA, 21 nt, Artificial Sequence
  SAMD9 targeting guide sequence portion
uauccuuuugagcuuuuuaaa

SEQ ID NO: 19652 - RNA, 21 nt, Artificial Sequence
  SAMD9 targeting guide sequence portion
uaucuaugucuaucaugaugu

SEQ ID NO: 19653 - RNA, 21 nt, Artificial Sequence
  SAMD9 targeting guide sequence portion
uaucucacaaacuugcuucug

SEQ ID NO: 19654 - RNA, 21 nt, Artificial Sequence
  SAMD9 targeting guide sequence portion
uaucucuauauauacugacug

SEQ ID NO: 19655 - RNA, 21 nt, Artificial Sequence
  SAMD9 targeting guide sequence portion
uaucucuugagagaaugugac

SEQ ID NO: 19656 - RNA, 21 nt, Artificial Sequence
  SAMD9 targeting guide sequence portion
uaugaguauuaagcauaguua

SEQ ID NO: 19657 - RNA, 21 nt, Artificial Sequence
  SAMD9 targeting guide sequence portion
uaugccaaugaauuaucucuu

SEQ ID NO: 19658 - RNA, 21 nt, Artificial Sequence
  SAMD9 targeting guide sequence portion
uaugccacaauuuauguggga

SEQ ID NO: 19659 - RNA, 21 nt, Artificial Sequence
  SAMD9 targeting guide sequence portion
uaugcucuauuuacuuuaucu

SEQ ID NO: 19660 - RNA, 21 nt, Artificial Sequence
  SAMD9 targeting guide sequence portion
uaugcuuaauacucauaugcu

SEQ ID NO: 19661 - RNA, 21 nt, Artificial Sequence
  SAMD9 targeting guide sequence portion
uauguauaguaugccacaauu

SEQ ID NO: 19662 - RNA, 21 nt, Artificial Sequence
  SAMD9 targeting guide sequence portion
uaugucuaucaugauguaucu

SEQ ID NO: 19663 - RNA, 21 nt, Artificial Sequence
  SAMD9 targeting guide sequence portion
uaugugggaaaaguguguuca

SEQ ID NO: 19664 - RNA, 21 nt, Artificial Sequence
  SAMD9 targeting guide sequence portion
uauuaaugauuguuugcuaua

SEQ ID NO: 19665 - RNA, 21 nt, Artificial Sequence
  SAMD9 targeting guide sequence portion
uauuauuuaagaacguucaau

SEQ ID NO: 19666 - RNA, 21 nt, Artificial Sequence
  SAMD9 targeting guide sequence portion
uauucuuucucuggagggaug

SEQ ID NO: 19667 - RNA, 21 nt, Artificial Sequence
  SAMD9 targeting guide sequence portion
uauugccaguuucuucugcau

SEQ ID NO: 19668 - RNA, 21 nt, Artificial Sequence
  SAMD9 targeting guide sequence portion
uauuuaagaacguucaauucu

SEQ ID NO: 19669 - RNA, 21 nt, Artificial Sequence
  SAMD9 targeting guide sequence portion
uauuuacuuuaucuaugucua

SEQ ID NO: 19670 - RNA, 21 nt, Artificial Sequence
  SAMD9 targeting guide sequence portion
uauuugaaacuaaguacagaa

SEQ ID NO: 19671 - RNA, 21 nt, Artificial Sequence
  SAMD9 targeting guide sequence portion
uauuugguauucuuucucugg

SEQ ID NO: 19672 - RNA, 21 nt, Artificial Sequence
  SAMD9 targeting guide sequence portion
uauuuucuauagcagaauuga

SEQ ID NO: 19673 - RNA, 21 nt, Artificial Sequence
  SAMD9 targeting guide sequence portion
ucaaaaggauaugccaaugaa

SEQ ID NO: 19674 - RNA, 21 nt, Artificial Sequence
  SAMD9 targeting guide sequence portion
ucaaaauuuaaaaagcucaaa

SEQ ID NO: 19675 - RNA, 21 nt, Artificial Sequence
  SAMD9 targeting guide sequence portion
ucaaauauccuucuuuuuucu

SEQ ID NO: 19676 - RNA, 21 nt, Artificial Sequence
  SAMD9 targeting guide sequence portion
ucaagagauaauucauuggca

SEQ ID NO: 19677 - RNA, 21 nt, Artificial Sequence
  SAMD9 targeting guide sequence portion
ucaauucugcuauagaaaaua

SEQ ID NO: 19678 - RNA, 21 nt, Artificial Sequence
  SAMD9 targeting guide sequence portion
ucacaaacuugcuucuguacu

SEQ ID NO: 19679 - RNA, 21 nt, Artificial Sequence
  SAMD9 targeting guide sequence portion
ucacauucucucaagagauaa

SEQ ID NO: 19680 - RNA, 21 nt, Artificial Sequence
  SAMD9 targeting guide sequence portion
ucacuaaguaaauuuugggaa

SEQ ID NO: 19681 - RNA, 21 nt, Artificial Sequence
  SAMD9 targeting guide sequence portion
ucaguauauauagagauaguu

SEQ ID NO: 19682 - RNA, 21 nt, Artificial Sequence
  SAMD9 targeting guide sequence portion
ucauaugcucuauuuacuuua

SEQ ID NO: 19683 - RNA, 21 nt, Artificial Sequence
  SAMD9 targeting guide sequence portion
ucaugauagacauagauaaag

SEQ ID NO: 19684 - RNA, 21 nt, Artificial Sequence
  SAMD9 targeting guide sequence portion
ucaugauguaucucacaaacu

SEQ ID NO: 19685 - RNA, 21 nt, Artificial Sequence
  SAMD9 targeting guide sequence portion
ucauguguuuguauuugguau

SEQ ID NO: 19686 - RNA, 21 nt, Artificial Sequence
  SAMD9 targeting guide sequence portion
ucauuaauaaggauaaacuau

SEQ ID NO: 19687 - RNA, 21 nt, Artificial Sequence
  SAMD9 targeting guide sequence portion
ucauucacuaaguaaauuuug

SEQ ID NO: 19688 - RNA, 21 nt, Artificial Sequence
  SAMD9 targeting guide sequence portion
ucauuggcauauccuuuugag

SEQ ID NO: 19689 - RNA, 21 nt, Artificial Sequence
  SAMD9 targeting guide sequence portion
uccagagaaagaauaccaaau

SEQ ID NO: 19690 - RNA, 21 nt, Artificial Sequence
  SAMD9 targeting guide sequence portion
uccagucaguauauauagaga

SEQ ID NO: 19691 - RNA, 21 nt, Artificial Sequence
  SAMD9 targeting guide sequence portion
ucccaaaauuuacuuagugaa

SEQ ID NO: 19692 - RNA, 21 nt, Artificial Sequence
  SAMD9 targeting guide sequence portion
ucccacauaaauuguggcaua

SEQ ID NO: 19693 - RNA, 21 nt, Artificial Sequence
  SAMD9 targeting guide sequence portion
ucccuccagagaaagaauacc

SEQ ID NO: 19694 - RNA, 21 nt, Artificial Sequence
  SAMD9 targeting guide sequence portion
ucccuuucuaacuaugcuuaa

SEQ ID NO: 19695 - RNA, 21 nt, Artificial Sequence
  SAMD9 targeting guide sequence portion
uccuuauuaaugauuguuugc

SEQ ID NO: 19696 - RNA, 21 nt, Artificial Sequence
  SAMD9 targeting guide sequence portion
uccuucuuuuuucucuuauuu

SEQ ID NO: 19697 - RNA, 21 nt, Artificial Sequence
  SAMD9 targeting guide sequence portion
uccuuuugagcuuuuuaaauu

SEQ ID NO: 19698 - RNA, 21 nt, Artificial Sequence
  SAMD9 targeting guide sequence portion
ucuaacuaugcuuaauacuca

SEQ ID NO: 19699 - RNA, 21 nt, Artificial Sequence
  SAMD9 targeting guide sequence portion
ucuauagcagaauugaacguu

SEQ ID NO: 19700 - RNA, 21 nt, Artificial Sequence
  SAMD9 targeting guide sequence portion
ucuauauauacugacuggaag

SEQ ID NO: 19701 - RNA, 21 nt, Artificial Sequence
  SAMD9 targeting guide sequence portion
ucuaucaugauguaucucaca

SEQ ID NO: 19702 - RNA, 21 nt, Artificial Sequence
  SAMD9 targeting guide sequence portion
ucuaugucuaucaugauguau

SEQ ID NO: 19703 - RNA, 21 nt, Artificial Sequence
  SAMD9 targeting guide sequence portion
ucuauuuacuuuaucuauguc

SEQ ID NO: 19704 - RNA, 21 nt, Artificial Sequence
  SAMD9 targeting guide sequence portion
ucucaagagauaauucauugg

SEQ ID NO: 19705 - RNA, 21 nt, Artificial Sequence
  SAMD9 targeting guide sequence portion
ucucacaaacuugcuucugua

SEQ ID NO: 19706 - RNA, 21 nt, Artificial Sequence
  SAMD9 targeting guide sequence portion
ucucuauauauacugacugga

SEQ ID NO: 19707 - RNA, 21 nt, Artificial Sequence
  SAMD9 targeting guide sequence portion
ucucucaagagauaauucauu

SEQ ID NO: 19708 - RNA, 21 nt, Artificial Sequence
  SAMD9 targeting guide sequence portion
ucucuggagggaugcagaaga

SEQ ID NO: 19709 - RNA, 21 nt, Artificial Sequence
  SAMD9 targeting guide sequence portion
ucucuuauuuucuauagcaga

SEQ ID NO: 19710 - RNA, 21 nt, Artificial Sequence
  SAMD9 targeting guide sequence portion
ucucuugagagaaugugacua

SEQ ID NO: 19711 - RNA, 21 nt, Artificial Sequence
  SAMD9 targeting guide sequence portion
ucucuugcuucauucacuaag

SEQ ID NO: 19712 - RNA, 21 nt, Artificial Sequence
  SAMD9 targeting guide sequence portion
ucugcaucccuccagagaaag

SEQ ID NO: 19713 - RNA, 21 nt, Artificial Sequence
  SAMD9 targeting guide sequence portion
ucugcuauagaaaauaagaga

SEQ ID NO: 19714 - RNA, 21 nt, Artificial Sequence
  SAMD9 targeting guide sequence portion
ucuggagggaugcagaagaaa

SEQ ID NO: 19715 - RNA, 21 nt, Artificial Sequence
  SAMD9 targeting guide sequence portion
ucuguacuuaguuucaaauau

SEQ ID NO: 19716 - RNA, 21 nt, Artificial Sequence
  SAMD9 targeting guide sequence portion
ucuuaaauaauacagcaaaca

SEQ ID NO: 19717 - RNA, 21 nt, Artificial Sequence
  SAMD9 targeting guide sequence portion
ucuuauuuucuauagcagaau

SEQ ID NO: 19718 - RNA, 21 nt, Artificial Sequence
  SAMD9 targeting guide sequence portion
ucuucugcaucccuccagaga

SEQ ID NO: 19719 - RNA, 21 nt, Artificial Sequence
  SAMD9 targeting guide sequence portion
ucuugagagaaugugacuauu

SEQ ID NO: 19720 - RNA, 21 nt, Artificial Sequence
  SAMD9 targeting guide sequence portion
ucuugcuucauucacuaagua

SEQ ID NO: 19721 - RNA, 21 nt, Artificial Sequence
  SAMD9 targeting guide sequence portion
ucuuucucuggagggaugcag

SEQ ID NO: 19722 - RNA, 21 nt, Artificial Sequence
  SAMD9 targeting guide sequence portion
ucuuuuuucucuuauuuucua

SEQ ID NO: 19723 - RNA, 21 nt, Artificial Sequence
  SAMD9 targeting guide sequence portion
ugaaacuaaguacagaagcaa

SEQ ID NO: 19724 - RNA, 21 nt, Artificial Sequence
  SAMD9 targeting guide sequence portion
ugaacacacuuuucccacaua

SEQ ID NO: 19725 - RNA, 21 nt, Artificial Sequence
  SAMD9 targeting guide sequence portion
ugaacguucuuaaauaauaca

SEQ ID NO: 19726 - RNA, 21 nt, Artificial Sequence
  SAMD9 targeting guide sequence portion
ugaagcaagagaauuauguau

SEQ ID NO: 19727 - RNA, 21 nt, Artificial Sequence
  SAMD9 targeting guide sequence portion
ugaaugaagcaagagaauuau

SEQ ID NO: 19728 - RNA, 21 nt, Artificial Sequence
  SAMD9 targeting guide sequence portion
ugaauuaucucuugagagaau

SEQ ID NO: 19729 - RNA, 21 nt, Artificial Sequence
  SAMD9 targeting guide sequence portion
ugacuauugccaguuucuucu

SEQ ID NO: 19730 - RNA, 21 nt, Artificial Sequence
  SAMD9 targeting guide sequence portion
ugacuggaagcauucccaaaa

SEQ ID NO: 19731 - RNA, 21 nt, Artificial Sequence
  SAMD9 targeting guide sequence portion
ugagagaaugugacuauugcc

SEQ ID NO: 19732 - RNA, 21 nt, Artificial Sequence
  SAMD9 targeting guide sequence portion
ugagauacaucaugauagaca

SEQ ID NO: 19733 - RNA, 21 nt, Artificial Sequence
  SAMD9 targeting guide sequence portion
ugaguauuaagcauaguuaga

SEQ ID NO: 19734 - RNA, 21 nt, Artificial Sequence
  SAMD9 targeting guide sequence portion
ugauagacauagauaaaguaa

SEQ ID NO: 19735 - RNA, 21 nt, Artificial Sequence
  SAMD9 targeting guide sequence portion
ugauguaucucacaaacuugc

SEQ ID NO: 19736 - RNA, 21 nt, Artificial Sequence
  SAMD9 targeting guide sequence portion
ugauuguuugcuauaaugugu

SEQ ID NO: 19737 - RNA, 21 nt, Artificial Sequence
  SAMD9 targeting guide sequence portion
ugcagaagaaacuggcaauag

SEQ ID NO: 19738 - RNA, 21 nt, Artificial Sequence
  SAMD9 targeting guide sequence portion
ugcaucccuccagagaaagaa

SEQ ID NO: 19739 - RNA, 21 nt, Artificial Sequence
  SAMD9 targeting guide sequence portion
ugccaaugaauuaucucuuga

SEQ ID NO: 19740 - RNA, 21 nt, Artificial Sequence
  SAMD9 targeting guide sequence portion
ugccacaauuuaugugggaaa

SEQ ID NO: 19741 - RNA, 21 nt, Artificial Sequence
  SAMD9 targeting guide sequence portion
ugccaguuucuucugcauccc

SEQ ID NO: 19742 - RNA, 21 nt, Artificial Sequence
  SAMD9 targeting guide sequence portion
ugcuauaauguguguuugcug

SEQ ID NO: 19743 - RNA, 21 nt, Artificial Sequence
  SAMD9 targeting guide sequence portion
ugcuauagaaaauaagagaaa

SEQ ID NO: 19744 - RNA, 21 nt, Artificial Sequence
  SAMD9 targeting guide sequence portion
ugcucuauuuacuuuaucuau

SEQ ID NO: 19745 - RNA, 21 nt, Artificial Sequence
  SAMD9 targeting guide sequence portion
ugcuguauuauuuaagaacgu

SEQ ID NO: 19746 - RNA, 21 nt, Artificial Sequence
  SAMD9 targeting guide sequence portion
ugcuuaauacucauaugcucu

SEQ ID NO: 19747 - RNA, 21 nt, Artificial Sequence
  SAMD9 targeting guide sequence portion
ugcuucauucacuaaguaaau

SEQ ID NO: 19748 - RNA, 21 nt, Artificial Sequence
  SAMD9 targeting guide sequence portion
ugcuuccagucaguauauaua

SEQ ID NO: 19749 - RNA, 21 nt, Artificial Sequence
  SAMD9 targeting guide sequence portion
ugcuucuguacuuaguuucaa

SEQ ID NO: 19750 - RNA, 21 nt, Artificial Sequence
  SAMD9 targeting guide sequence portion
uggaagcauucccaaaauuua

SEQ ID NO: 19751 - RNA, 21 nt, Artificial Sequence
  SAMD9 targeting guide sequence portion
uggagggaugcagaagaaacu

SEQ ID NO: 19752 - RNA, 21 nt, Artificial Sequence
  SAMD9 targeting guide sequence portion
uggcaauagucacauucucuc

SEQ ID NO: 19753 - RNA, 21 nt, Artificial Sequence
  SAMD9 targeting guide sequence portion
uggcauacuauacauaauucu

SEQ ID NO: 19754 - RNA, 21 nt, Artificial Sequence
  SAMD9 targeting guide sequence portion
uggcauauccuuuugagcuuu

SEQ ID NO: 19755 - RNA, 21 nt, Artificial Sequence
  SAMD9 targeting guide sequence portion
ugggaaaaguguguucaugug

SEQ ID NO: 19756 - RNA, 21 nt, Artificial Sequence
  SAMD9 targeting guide sequence portion
ugggaaugcuuccagucagua

SEQ ID NO: 19757 - RNA, 21 nt, Artificial Sequence
  SAMD9 targeting guide sequence portion
ugguauucuuucucuggaggg

SEQ ID NO: 19758 - RNA, 21 nt, Artificial Sequence
  SAMD9 targeting guide sequence portion
uguacuuaguuucaaauaucc

SEQ ID NO: 19759 - RNA, 21 nt, Artificial Sequence
  SAMD9 targeting guide sequence portion
uguauaguaugccacaauuua

SEQ ID NO: 19760 - RNA, 21 nt, Artificial Sequence
  SAMD9 targeting guide sequence portion
uguaucucacaaacuugcuuc

SEQ ID NO: 19761 - RNA, 21 nt, Artificial Sequence
  SAMD9 targeting guide sequence portion
uguauuauuuaagaacguuca

SEQ ID NO: 19762 - RNA, 21 nt, Artificial Sequence
  SAMD9 targeting guide sequence portion
uguauuugguauucuuucucu

SEQ ID NO: 19763 - RNA, 21 nt, Artificial Sequence
  SAMD9 targeting guide sequence portion
ugucuaucaugauguaucuca

SEQ ID NO: 19764 - RNA, 21 nt, Artificial Sequence
  SAMD9 targeting guide sequence portion
ugugacuauugccaguuucuu

SEQ ID NO: 19765 - RNA, 21 nt, Artificial Sequence
  SAMD9 targeting guide sequence portion
ugugagauacaucaugauaga

SEQ ID NO: 19766 - RNA, 21 nt, Artificial Sequence
  SAMD9 targeting guide sequence portion
uguggcauacuauacauaauu

SEQ ID NO: 19767 - RNA, 21 nt, Artificial Sequence
  SAMD9 targeting guide sequence portion
ugugggaaaaguguguucaug

SEQ ID NO: 19768 - RNA, 21 nt, Artificial Sequence
  SAMD9 targeting guide sequence portion
uguguguuugcuguauuauuu

SEQ ID NO: 19769 - RNA, 21 nt, Artificial Sequence
  SAMD9 targeting guide sequence portion
uguguucauguguuuguauuu

SEQ ID NO: 19770 - RNA, 21 nt, Artificial Sequence
  SAMD9 targeting guide sequence portion
uguguuugcuguauuauuuaa

SEQ ID NO: 19771 - RNA, 21 nt, Artificial Sequence
  SAMD9 targeting guide sequence portion
uguguuuguauuugguauucu

SEQ ID NO: 19772 - RNA, 21 nt, Artificial Sequence
  SAMD9 targeting guide sequence portion
uguucauguguuuguauuugg

SEQ ID NO: 19773 - RNA, 21 nt, Artificial Sequence
  SAMD9 targeting guide sequence portion
uguuugcuauaauguguguuu

SEQ ID NO: 19774 - RNA, 21 nt, Artificial Sequence
  SAMD9 targeting guide sequence portion
uguuugcuguauuauuuaaga

SEQ ID NO: 19775 - RNA, 21 nt, Artificial Sequence
  SAMD9 targeting guide sequence portion
uguuuguauuugguauucuuu

SEQ ID NO: 19776 - RNA, 21 nt, Artificial Sequence
  SAMD9 targeting guide sequence portion
uuaaaaagcucaaaaggauau

SEQ ID NO: 19777 - RNA, 21 nt, Artificial Sequence
  SAMD9 targeting guide sequence portion
uuaaauaauacagcaaacaca

SEQ ID NO: 19778 - RNA, 21 nt, Artificial Sequence
  SAMD9 targeting guide sequence portion
uuaagaacguucaauucugcu

SEQ ID NO: 19779 - RNA, 21 nt, Artificial Sequence
  SAMD9 targeting guide sequence portion
uuaauacucauaugcucuauu

SEQ ID NO: 19780 - RNA, 21 nt, Artificial Sequence
  SAMD9 targeting guide sequence portion
uuaaugauuguuugcuauaau

SEQ ID NO: 19781 - RNA, 21 nt, Artificial Sequence
  SAMD9 targeting guide sequence portion
uuacuuagugaaugaagcaag

SEQ ID NO: 19782 - RNA, 21 nt, Artificial Sequence
  SAMD9 targeting guide sequence portion
uuacuuuaucuaugucuauca

SEQ ID NO: 19783 - RNA, 21 nt, Artificial Sequence
  SAMD9 targeting guide sequence portion
uuagugaaugaagcaagagaa

SEQ ID NO: 19784 - RNA, 21 nt, Artificial Sequence
  SAMD9 targeting guide sequence portion
uuaguuucaaauauccuucuu

SEQ ID NO: 19785 - RNA, 21 nt, Artificial Sequence
  SAMD9 targeting guide sequence portion
uuauagcaaacaaucauuaau

SEQ ID NO: 19786 - RNA, 21 nt, Artificial Sequence
  SAMD9 targeting guide sequence portion
uuauccuuauuaaugauuguu

SEQ ID NO: 19787 - RNA, 21 nt, Artificial Sequence
  SAMD9 targeting guide sequence portion
uuaucuaugucuaucaugaug

SEQ ID NO: 19788 - RNA, 21 nt, Artificial Sequence
  SAMD9 targeting guide sequence portion
uuaucucuugagagaauguga

SEQ ID NO: 19789 - RNA, 21 nt, Artificial Sequence
  SAMD9 targeting guide sequence portion
uuauguauaguaugccacaau

SEQ ID NO: 19790 - RNA, 21 nt, Artificial Sequence
  SAMD9 targeting guide sequence portion
uuaugugggaaaaguguguuc

SEQ ID NO: 19791 - RNA, 21 nt, Artificial Sequence
  SAMD9 targeting guide sequence portion
uuauuaaugauuguuugcuau

SEQ ID NO: 19792 - RNA, 21 nt, Artificial Sequence
  SAMD9 targeting guide sequence portion
uuauuuaagaacguucaauuc

SEQ ID NO: 19793 - RNA, 21 nt, Artificial Sequence
  SAMD9 targeting guide sequence portion
uuauuuucuauagcagaauug

SEQ ID NO: 19794 - RNA, 21 nt, Artificial Sequence
  SAMD9 targeting guide sequence portion
uucaaaauuuaaaaagcucaa

SEQ ID NO: 19795 - RNA, 21 nt, Artificial Sequence
  SAMD9 targeting guide sequence portion
uucaaauauccuucuuuuuuc

SEQ ID NO: 19796 - RNA, 21 nt, Artificial Sequence
  SAMD9 targeting guide sequence portion
uucaauucugcuauagaaaau

SEQ ID NO: 19797 - RNA, 21 nt, Artificial Sequence
  SAMD9 targeting guide sequence portion
uucacuaaguaaauuuuggga

SEQ ID NO: 19798 - RNA, 21 nt, Artificial Sequence
  SAMD9 targeting guide sequence portion
uucauguguuuguauuuggua

SEQ ID NO: 19799 - RNA, 21 nt, Artificial Sequence
  SAMD9 targeting guide sequence portion
uucauucacuaaguaaauuuu

SEQ ID NO: 19800 - RNA, 21 nt, Artificial Sequence
  SAMD9 targeting guide sequence portion
uucauuggcauauccuuuuga

SEQ ID NO: 19801 - RNA, 21 nt, Artificial Sequence
  SAMD9 targeting guide sequence portion
uuccagucaguauauauagag

SEQ ID NO: 19802 - RNA, 21 nt, Artificial Sequence
  SAMD9 targeting guide sequence portion
uucccaaaauuuacuuaguga

SEQ ID NO: 19803 - RNA, 21 nt, Artificial Sequence
  SAMD9 targeting guide sequence portion
uucccacauaaauuguggcau

SEQ ID NO: 19804 - RNA, 21 nt, Artificial Sequence
  SAMD9 targeting guide sequence portion
uucuaacuaugcuuaauacuc

SEQ ID NO: 19805 - RNA, 21 nt, Artificial Sequence
  SAMD9 targeting guide sequence portion
uucuauagcagaauugaacgu

SEQ ID NO: 19806 - RNA, 21 nt, Artificial Sequence
  SAMD9 targeting guide sequence portion
uucucucaagagauaauucau

SEQ ID NO: 19807 - RNA, 21 nt, Artificial Sequence
  SAMD9 targeting guide sequence portion
uucucuggagggaugcagaag

SEQ ID NO: 19808 - RNA, 21 nt, Artificial Sequence
  SAMD9 targeting guide sequence portion
uucucuuauuuucuauagcag

SEQ ID NO: 19809 - RNA, 21 nt, Artificial Sequence
  SAMD9 targeting guide sequence portion
uucucuugcuucauucacuaa

SEQ ID NO: 19810 - RNA, 21 nt, Artificial Sequence
  SAMD9 targeting guide sequence portion
uucugcaucccuccagagaaa

SEQ ID NO: 19811 - RNA, 21 nt, Artificial Sequence
  SAMD9 targeting guide sequence portion
uucugcuauagaaaauaagag

SEQ ID NO: 19812 - RNA, 21 nt, Artificial Sequence
  SAMD9 targeting guide sequence portion
uucuguacuuaguuucaaaua

SEQ ID NO: 19813 - RNA, 21 nt, Artificial Sequence
  SAMD9 targeting guide sequence portion
uucuuaaauaauacagcaaac

SEQ ID NO: 19814 - RNA, 21 nt, Artificial Sequence
  SAMD9 targeting guide sequence portion
uucuucugcaucccuccagag

SEQ ID NO: 19815 - RNA, 21 nt, Artificial Sequence
  SAMD9 targeting guide sequence portion
uucuuucucuggagggaugca

SEQ ID NO: 19816 - RNA, 21 nt, Artificial Sequence
  SAMD9 targeting guide sequence portion
uucuuuuuucucuuauuuucu

SEQ ID NO: 19817 - RNA, 21 nt, Artificial Sequence
  SAMD9 targeting guide sequence portion
uugaaacuaaguacagaagca

SEQ ID NO: 19818 - RNA, 21 nt, Artificial Sequence
  SAMD9 targeting guide sequence portion
uugaacguucuuaaauaauac

SEQ ID NO: 19819 - RNA, 21 nt, Artificial Sequence
  SAMD9 targeting guide sequence portion
uugagagaaugugacuauugc

SEQ ID NO: 19820 - RNA, 21 nt, Artificial Sequence
  SAMD9 targeting guide sequence portion
uugccaguuucuucugcaucc

SEQ ID NO: 19821 - RNA, 21 nt, Artificial Sequence
  SAMD9 targeting guide sequence portion
uugcuauaauguguguuugcu

SEQ ID NO: 19822 - RNA, 21 nt, Artificial Sequence
  SAMD9 targeting guide sequence portion
uugcuguauuauuuaagaacg

SEQ ID NO: 19823 - RNA, 21 nt, Artificial Sequence
  SAMD9 targeting guide sequence portion
uugcuucauucacuaaguaaa

SEQ ID NO: 19824 - RNA, 21 nt, Artificial Sequence
  SAMD9 targeting guide sequence portion
uugcuucuguacuuaguuuca

SEQ ID NO: 19825 - RNA, 21 nt, Artificial Sequence
  SAMD9 targeting guide sequence portion
uuggcauauccuuuugagcuu

SEQ ID NO: 19826 - RNA, 21 nt, Artificial Sequence
  SAMD9 targeting guide sequence portion
uugggaaugcuuccagucagu

SEQ ID NO: 19827 - RNA, 21 nt, Artificial Sequence
  SAMD9 targeting guide sequence portion
uugguauucuuucucuggagg

SEQ ID NO: 19828 - RNA, 21 nt, Artificial Sequence
  SAMD9 targeting guide sequence portion
uuguauuugguauucuuucuc

SEQ ID NO: 19829 - RNA, 21 nt, Artificial Sequence
  SAMD9 targeting guide sequence portion
uugugagauacaucaugauag

SEQ ID NO: 19830 - RNA, 21 nt, Artificial Sequence
  SAMD9 targeting guide sequence portion
uuguggcauacuauacauaau

SEQ ID NO: 19831 - RNA, 21 nt, Artificial Sequence
  SAMD9 targeting guide sequence portion
uuguuugcuauaauguguguu

SEQ ID NO: 19832 - RNA, 21 nt, Artificial Sequence
  SAMD9 targeting guide sequence portion
uuuaaaaagcucaaaaggaua

SEQ ID NO: 19833 - RNA, 21 nt, Artificial Sequence
  SAMD9 targeting guide sequence portion
uuuaagaacguucaauucugc

SEQ ID NO: 19834 - RNA, 21 nt, Artificial Sequence
  SAMD9 targeting guide sequence portion
uuuacuuagugaaugaagcaa

SEQ ID NO: 19835 - RNA, 21 nt, Artificial Sequence
  SAMD9 targeting guide sequence portion
uuuacuuuaucuaugucuauc

SEQ ID NO: 19836 - RNA, 21 nt, Artificial Sequence
  SAMD9 targeting guide sequence portion
uuuauccuuauuaaugauugu

SEQ ID NO: 19837 - RNA, 21 nt, Artificial Sequence
  SAMD9 targeting guide sequence portion
uuuaucuaugucuaucaugau

SEQ ID NO: 19838 - RNA, 21 nt, Artificial Sequence
  SAMD9 targeting guide sequence portion
uuuaugugggaaaaguguguu

SEQ ID NO: 19839 - RNA, 21 nt, Artificial Sequence
  SAMD9 targeting guide sequence portion
uuucaaaauuuaaaaagcuca

SEQ ID NO: 19840 - RNA, 21 nt, Artificial Sequence
  SAMD9 targeting guide sequence portion
uuucaaauauccuucuuuuuu

SEQ ID NO: 19841 - RNA, 21 nt, Artificial Sequence
  SAMD9 targeting guide sequence portion
uuucccacauaaauuguggca

SEQ ID NO: 19842 - RNA, 21 nt, Artificial Sequence
  SAMD9 targeting guide sequence portion
uuucuaacuaugcuuaauacu

SEQ ID NO: 19843 - RNA, 21 nt, Artificial Sequence
  SAMD9 targeting guide sequence portion
uuucuauagcagaauugaacg

SEQ ID NO: 19844 - RNA, 21 nt, Artificial Sequence
  SAMD9 targeting guide sequence portion
uuucucuggagggaugcagaa

SEQ ID NO: 19845 - RNA, 21 nt, Artificial Sequence
  SAMD9 targeting guide sequence portion
uuucucuuauuuucuauagca

SEQ ID NO: 19846 - RNA, 21 nt, Artificial Sequence
  SAMD9 targeting guide sequence portion
uuucuucugcaucccuccaga

SEQ ID NO: 19847 - RNA, 21 nt, Artificial Sequence
  SAMD9 targeting guide sequence portion
uuugaaacuaaguacagaagc

SEQ ID NO: 19848 - RNA, 21 nt, Artificial Sequence
  SAMD9 targeting guide sequence portion
uuugcuauaauguguguuugc

SEQ ID NO: 19849 - RNA, 21 nt, Artificial Sequence
  SAMD9 targeting guide sequence portion
uuugcuguauuauuuaagaac

SEQ ID NO: 19850 - RNA, 21 nt, Artificial Sequence
  SAMD9 targeting guide sequence portion
uuugggaaugcuuccagucag

SEQ ID NO: 19851 - RNA, 21 nt, Artificial Sequence
  SAMD9 targeting guide sequence portion
uuugguauucuuucucuggag

SEQ ID NO: 19852 - RNA, 21 nt, Artificial Sequence
  SAMD9 targeting guide sequence portion
uuuguauuugguauucuuucu

SEQ ID NO: 19853 - RNA, 21 nt, Artificial Sequence
  SAMD9 targeting guide sequence portion
uuugugagauacaucaugaua

SEQ ID NO: 19854 - RNA, 21 nt, Artificial Sequence
  SAMD9 targeting guide sequence portion
uuuucaaaauuuaaaaagcuc

SEQ ID NO: 19855 - RNA, 21 nt, Artificial Sequence
  SAMD9 targeting guide sequence portion
uuuucccacauaaauuguggc

SEQ ID NO: 19856 - RNA, 21 nt, Artificial Sequence
  SAMD9 targeting guide sequence portion
uuuucuauagcagaauugaac

SEQ ID NO: 19857 - RNA, 21 nt, Artificial Sequence
  SAMD9 targeting guide sequence portion
uuuucucuuauuuucuauagc

SEQ ID NO: 19858 - RNA, 21 nt, Artificial Sequence
  SAMD9 targeting guide sequence portion
uuuugggaaugcuuccaguca

SEQ ID NO: 19859 - RNA, 21 nt, Artificial Sequence
  SAMD9 targeting guide sequence portion
uuuuucucuuauuuucuauag

SEQ ID NO: 19860 - RNA, 21 nt, Artificial Sequence
  SAMD9 targeting guide sequence portion
uuuuuucucuuauuuucuaua

SEQ ID NO: 19861 - RNA, 22 nt, Artificial Sequence
  SAMD9 targeting guide sequence portion
aaaaaagaaggauauuugaaac

SEQ ID NO: 19862 - RNA, 22 nt, Artificial Sequence
  SAMD9 targeting guide sequence portion
aaaaagaaggauauuugaaacu

SEQ ID NO: 19863 - RNA, 22 nt, Artificial Sequence
  SAMD9 targeting guide sequence portion
aaaaagcucaaaaggauaugcc

SEQ ID NO: 19864 - RNA, 22 nt, Artificial Sequence
  SAMD9 targeting guide sequence portion
aaaagaaggauauuugaaacua

SEQ ID NO: 19865 - RNA, 22 nt, Artificial Sequence
  SAMD9 targeting guide sequence portion
aaaagcucaaaaggauaugcca

SEQ ID NO: 19866 - RNA, 22 nt, Artificial Sequence
  SAMD9 targeting guide sequence portion
aaaaggauaugccaaugaauua

SEQ ID NO: 19867 - RNA, 22 nt, Artificial Sequence
  SAMD9 targeting guide sequence portion
aaaaguguguucauguguuugu

SEQ ID NO: 19868 - RNA, 22 nt, Artificial Sequence
  SAMD9 targeting guide sequence portion
aaaauaagagaaaaaagaagga

SEQ ID NO: 19869 - RNA, 22 nt, Artificial Sequence
  SAMD9 targeting guide sequence portion
aaaauuuaaaaagcucaaaagg

SEQ ID NO: 19870 - RNA, 22 nt, Artificial Sequence
  SAMD9 targeting guide sequence portion
aaaauuuacuuagugaaugaag

SEQ ID NO: 19871 - RNA, 22 nt, Artificial Sequence
  SAMD9 targeting guide sequence portion
aaacaaucauuaauaaggauaa

SEQ ID NO: 19872 - RNA, 22 nt, Artificial Sequence
  SAMD9 targeting guide sequence portion
aaacacacauuauagcaaacaa

SEQ ID NO: 19873 - RNA, 22 nt, Artificial Sequence
  SAMD9 targeting guide sequence portion
aaacacaugaacacacuuuucc

SEQ ID NO: 19874 - RNA, 22 nt, Artificial Sequence
  SAMD9 targeting guide sequence portion
aaacuaaguacagaagcaaguu

SEQ ID NO: 19875 - RNA, 22 nt, Artificial Sequence
  SAMD9 targeting guide sequence portion
aaacuaucucuauauauacuga

SEQ ID NO: 19876 - RNA, 22 nt, Artificial Sequence
  SAMD9 targeting guide sequence portion
aaacuggcaauagucacauucu

SEQ ID NO: 19877 - RNA, 22 nt, Artificial Sequence
  SAMD9 targeting guide sequence portion
aaacuugcuucuguacuuaguu

SEQ ID NO: 19878 - RNA, 22 nt, Artificial Sequence
  SAMD9 targeting guide sequence portion
aaagaaggauauuugaaacuaa

SEQ ID NO: 19879 - RNA, 22 nt, Artificial Sequence
  SAMD9 targeting guide sequence portion
aaagaauaccaaauacaaacac

SEQ ID NO: 19880 - RNA, 22 nt, Artificial Sequence
  SAMD9 targeting guide sequence portion
aaagcucaaaaggauaugccaa

SEQ ID NO: 19881 - RNA, 22 nt, Artificial Sequence
  SAMD9 targeting guide sequence portion
aaaggauaugccaaugaauuau

SEQ ID NO: 19882 - RNA, 22 nt, Artificial Sequence
  SAMD9 targeting guide sequence portion
aaaguaaauagagcauaugagu

SEQ ID NO: 19883 - RNA, 22 nt, Artificial Sequence
  SAMD9 targeting guide sequence portion
aaaguguguucauguguuugua

SEQ ID NO: 19884 - RNA, 22 nt, Artificial Sequence
  SAMD9 targeting guide sequence portion
aaauaagagaaaaaagaaggau

SEQ ID NO: 19885 - RNA, 22 nt, Artificial Sequence
  SAMD9 targeting guide sequence portion
aaauaauacagcaaacacacau

SEQ ID NO: 19886 - RNA, 22 nt, Artificial Sequence
  SAMD9 targeting guide sequence portion
aaauacaaacacaugaacacac

SEQ ID NO: 19887 - RNA, 22 nt, Artificial Sequence
  SAMD9 targeting guide sequence portion
aaauagagcauaugaguauuaa

SEQ ID NO: 19888 - RNA, 22 nt, Artificial Sequence
  SAMD9 targeting guide sequence portion
aaauauccuucuuuuuucucuu

SEQ ID NO: 19889 - RNA, 22 nt, Artificial Sequence
  SAMD9 targeting guide sequence portion
aaauuguggcauacuauacaua

SEQ ID NO: 19890 - RNA, 22 nt, Artificial Sequence
  SAMD9 targeting guide sequence portion
aaauuuaaaaagcucaaaagga

SEQ ID NO: 19891 - RNA, 22 nt, Artificial Sequence
  SAMD9 targeting guide sequence portion
aaauuuacuuagugaaugaagc

SEQ ID NO: 19892 - RNA, 22 nt, Artificial Sequence
  SAMD9 targeting guide sequence portion
aaauuuugggaaugcuuccagu

SEQ ID NO: 19893 - RNA, 22 nt, Artificial Sequence
  SAMD9 targeting guide sequence portion
aacaaucauuaauaaggauaaa

SEQ ID NO: 19894 - RNA, 22 nt, Artificial Sequence
  SAMD9 targeting guide sequence portion
aacacacauuauagcaaacaau

SEQ ID NO: 19895 - RNA, 22 nt, Artificial Sequence
  SAMD9 targeting guide sequence portion
aacacacuuuucccacauaaau

SEQ ID NO: 19896 - RNA, 22 nt, Artificial Sequence
  SAMD9 targeting guide sequence portion
aacacaugaacacacuuuuccc

SEQ ID NO: 19897 - RNA, 22 nt, Artificial Sequence
  SAMD9 targeting guide sequence portion
aacguucaauucugcuauagaa

SEQ ID NO: 19898 - RNA, 22 nt, Artificial Sequence
  SAMD9 targeting guide sequence portion
aacguucuuaaauaauacagca

SEQ ID NO: 19899 - RNA, 22 nt, Artificial Sequence
  SAMD9 targeting guide sequence portion
aacuaaguacagaagcaaguuu

SEQ ID NO: 19900 - RNA, 22 nt, Artificial Sequence
  SAMD9 targeting guide sequence portion
aacuaucucuauauauacugac

SEQ ID NO: 19901 - RNA, 22 nt, Artificial Sequence
  SAMD9 targeting guide sequence portion
aacuaugcuuaauacucauaug

SEQ ID NO: 19902 - RNA, 22 nt, Artificial Sequence
  SAMD9 targeting guide sequence portion
aacuggcaauagucacauucuc

SEQ ID NO: 19903 - RNA, 22 nt, Artificial Sequence
  SAMD9 targeting guide sequence portion
aacuugcuucuguacuuaguuu

SEQ ID NO: 19904 - RNA, 22 nt, Artificial Sequence
  SAMD9 targeting guide sequence portion
aagaaacuggcaauagucacau

SEQ ID NO: 19905 - RNA, 22 nt, Artificial Sequence
  SAMD9 targeting guide sequence portion
aagaacguucaauucugcuaua

SEQ ID NO: 19906 - RNA, 22 nt, Artificial Sequence
  SAMD9 targeting guide sequence portion
aagaaggauauuugaaacuaag

SEQ ID NO: 19907 - RNA, 22 nt, Artificial Sequence
  SAMD9 targeting guide sequence portion
aagaauaccaaauacaaacaca

SEQ ID NO: 19908 - RNA, 22 nt, Artificial Sequence
  SAMD9 targeting guide sequence portion
aagagaaaaaagaaggauauuu

SEQ ID NO: 19909 - RNA, 22 nt, Artificial Sequence
  SAMD9 targeting guide sequence portion
aagagaauuauguauaguaugc

SEQ ID NO: 19910 - RNA, 22 nt, Artificial Sequence
  SAMD9 targeting guide sequence portion
aagagauaauucauuggcauau

SEQ ID NO: 19911 - RNA, 22 nt, Artificial Sequence
  SAMD9 targeting guide sequence portion
aagcaagagaauuauguauagu

SEQ ID NO: 19912 - RNA, 22 nt, Artificial Sequence
  SAMD9 targeting guide sequence portion
aagcaaguuugugagauacauc

SEQ ID NO: 19913 - RNA, 22 nt, Artificial Sequence
  SAMD9 targeting guide sequence portion
aagcauucccaaaauuuacuua

SEQ ID NO: 19914 - RNA, 22 nt, Artificial Sequence
  SAMD9 targeting guide sequence portion
aagcucaaaaggauaugccaau

SEQ ID NO: 19915 - RNA, 22 nt, Artificial Sequence
  SAMD9 targeting guide sequence portion
aaggauaaacuaucucuauaua

SEQ ID NO: 19916 - RNA, 22 nt, Artificial Sequence
  SAMD9 targeting guide sequence portion
aaggauaugccaaugaauuauc

SEQ ID NO: 19917 - RNA, 22 nt, Artificial Sequence
  SAMD9 targeting guide sequence portion
aaggauauuugaaacuaaguac

SEQ ID NO: 19918 - RNA, 22 nt, Artificial Sequence
  SAMD9 targeting guide sequence portion
aaguaaauagagcauaugagua

SEQ ID NO: 19919 - RNA, 22 nt, Artificial Sequence
  SAMD9 targeting guide sequence portion
aaguaaauuuugggaaugcuuc

SEQ ID NO: 19920 - RNA, 22 nt, Artificial Sequence
  SAMD9 targeting guide sequence portion
aaguacagaagcaaguuuguga

SEQ ID NO: 19921 - RNA, 22 nt, Artificial Sequence
  SAMD9 targeting guide sequence portion
aaguguguucauguguuuguau

SEQ ID NO: 19922 - RNA, 22 nt, Artificial Sequence
  SAMD9 targeting guide sequence portion
aaguuugugagauacaucauga

SEQ ID NO: 19923 - RNA, 22 nt, Artificial Sequence
  SAMD9 targeting guide sequence portion
aauaagagaaaaaagaaggaua

SEQ ID NO: 19924 - RNA, 22 nt, Artificial Sequence
  SAMD9 targeting guide sequence portion
aauaaggauaaacuaucucuau

SEQ ID NO: 19925 - RNA, 22 nt, Artificial Sequence
  SAMD9 targeting guide sequence portion
aauaauacagcaaacacacauu

SEQ ID NO: 19926 - RNA, 22 nt, Artificial Sequence
  SAMD9 targeting guide sequence portion
aauacaaacacaugaacacacu

SEQ ID NO: 19927 - RNA, 22 nt, Artificial Sequence
  SAMD9 targeting guide sequence portion
aauacagcaaacacacauuaua

SEQ ID NO: 19928 - RNA, 22 nt, Artificial Sequence
  SAMD9 targeting guide sequence portion
aauaccaaauacaaacacauga

SEQ ID NO: 19929 - RNA, 22 nt, Artificial Sequence
  SAMD9 targeting guide sequence portion
aauacucauaugcucuauuuac

SEQ ID NO: 19930 - RNA, 22 nt, Artificial Sequence
  SAMD9 targeting guide sequence portion
aauagagcauaugaguauuaag

SEQ ID NO: 19931 - RNA, 22 nt, Artificial Sequence
  SAMD9 targeting guide sequence portion
aauagucacauucucucaagag

SEQ ID NO: 19932 - RNA, 22 nt, Artificial Sequence
  SAMD9 targeting guide sequence portion
aauauccuucuuuuuucucuua

SEQ ID NO: 19933 - RNA, 22 nt, Artificial Sequence
  SAMD9 targeting guide sequence portion
aaucauuaauaaggauaaacua

SEQ ID NO: 19934 - RNA, 22 nt, Artificial Sequence
  SAMD9 targeting guide sequence portion
aaugaagcaagagaauuaugua

SEQ ID NO: 19935 - RNA, 22 nt, Artificial Sequence
  SAMD9 targeting guide sequence portion
aaugaauuaucucuugagagaa

SEQ ID NO: 19936 - RNA, 22 nt, Artificial Sequence
  SAMD9 targeting guide sequence portion
aaugauuguuugcuauaaugug

SEQ ID NO: 19937 - RNA, 22 nt, Artificial Sequence
  SAMD9 targeting guide sequence portion
aaugcuuccagucaguauauau

SEQ ID NO: 19938 - RNA, 22 nt, Artificial Sequence
  SAMD9 targeting guide sequence portion
aaugugacuauugccaguuucu

SEQ ID NO: 19939 - RNA, 22 nt, Artificial Sequence
  SAMD9 targeting guide sequence portion
aauguguguuugcuguauuauu

SEQ ID NO: 19940 - RNA, 22 nt, Artificial Sequence
  SAMD9 targeting guide sequence portion
aauuaucucuugagagaaugug

SEQ ID NO: 19941 - RNA, 22 nt, Artificial Sequence
  SAMD9 targeting guide sequence portion
aauuauguauaguaugccacaa

SEQ ID NO: 19942 - RNA, 22 nt, Artificial Sequence
  SAMD9 targeting guide sequence portion
aauucauuggcauauccuuuug

SEQ ID NO: 19943 - RNA, 22 nt, Artificial Sequence
  SAMD9 targeting guide sequence portion
aauucucuugcuucauucacua

SEQ ID NO: 19944 - RNA, 22 nt, Artificial Sequence
  SAMD9 targeting guide sequence portion
aauucugcuauagaaaauaaga

SEQ ID NO: 19945 - RNA, 22 nt, Artificial Sequence
  SAMD9 targeting guide sequence portion
aauugaacguucuuaaauaaua

SEQ ID NO: 19946 - RNA, 22 nt, Artificial Sequence
  SAMD9 targeting guide sequence portion
aauuguggcauacuauacauaa

SEQ ID NO: 19947 - RNA, 22 nt, Artificial Sequence
  SAMD9 targeting guide sequence portion
aauuuaaaaagcucaaaaggau

SEQ ID NO: 19948 - RNA, 22 nt, Artificial Sequence
  SAMD9 targeting guide sequence portion
aauuuacuuagugaaugaagca

SEQ ID NO: 19949 - RNA, 22 nt, Artificial Sequence
  SAMD9 targeting guide sequence portion
aauuuaugugggaaaagugugu

SEQ ID NO: 19950 - RNA, 22 nt, Artificial Sequence
  SAMD9 targeting guide sequence portion
aauuuugggaaugcuuccaguc

SEQ ID NO: 19951 - RNA, 22 nt, Artificial Sequence
  SAMD9 targeting guide sequence portion
acaaacacaugaacacacuuuu

SEQ ID NO: 19952 - RNA, 22 nt, Artificial Sequence
  SAMD9 targeting guide sequence portion
acaaacuugcuucuguacuuag

SEQ ID NO: 19953 - RNA, 22 nt, Artificial Sequence
  SAMD9 targeting guide sequence portion
acaaucauuaauaaggauaaac

SEQ ID NO: 19954 - RNA, 22 nt, Artificial Sequence
  SAMD9 targeting guide sequence portion
acaauuuaugugggaaaagugu

SEQ ID NO: 19955 - RNA, 22 nt, Artificial Sequence
  SAMD9 targeting guide sequence portion
acacacauuauagcaaacaauc

SEQ ID NO: 19956 - RNA, 22 nt, Artificial Sequence
  SAMD9 targeting guide sequence portion
acacacuuuucccacauaaauu

SEQ ID NO: 19957 - RNA, 22 nt, Artificial Sequence
  SAMD9 targeting guide sequence portion
acacaugaacacacuuuuccca

SEQ ID NO: 19958 - RNA, 22 nt, Artificial Sequence
  SAMD9 targeting guide sequence portion
acacauuauagcaaacaaucau

SEQ ID NO: 19959 - RNA, 22 nt, Artificial Sequence
  SAMD9 targeting guide sequence portion
acacuuuucccacauaaauugu

SEQ ID NO: 19960 - RNA, 22 nt, Artificial Sequence
  SAMD9 targeting guide sequence portion
acagaagcaaguuugugagaua

SEQ ID NO: 19961 - RNA, 22 nt, Artificial Sequence
  SAMD9 targeting guide sequence portion
acagcaaacacacauuauagca

SEQ ID NO: 19962 - RNA, 22 nt, Artificial Sequence
  SAMD9 targeting guide sequence portion
acauaaauuguggcauacuaua

SEQ ID NO: 19963 - RNA, 22 nt, Artificial Sequence
  SAMD9 targeting guide sequence portion
acauaauucucuugcuucauuc

SEQ ID NO: 19964 - RNA, 22 nt, Artificial Sequence
  SAMD9 targeting guide sequence portion
acauagauaaaguaaauagagc

SEQ ID NO: 19965 - RNA, 22 nt, Artificial Sequence
  SAMD9 targeting guide sequence portion
acaucaugauagacauagauaa

SEQ ID NO: 19966 - RNA, 22 nt, Artificial Sequence
  SAMD9 targeting guide sequence portion
acaugaacacacuuuucccaca

SEQ ID NO: 19967 - RNA, 22 nt, Artificial Sequence
  SAMD9 targeting guide sequence portion
acauuauagcaaacaaucauua

SEQ ID NO: 19968 - RNA, 22 nt, Artificial Sequence
  SAMD9 targeting guide sequence portion
acauucucucaagagauaauuc

SEQ ID NO: 19969 - RNA, 22 nt, Artificial Sequence
  SAMD9 targeting guide sequence portion
accaaauacaaacacaugaaca

SEQ ID NO: 19970 - RNA, 22 nt, Artificial Sequence
  SAMD9 targeting guide sequence portion
acguucaauucugcuauagaaa

SEQ ID NO: 19971 - RNA, 22 nt, Artificial Sequence
  SAMD9 targeting guide sequence portion
acguucuuaaauaauacagcaa

SEQ ID NO: 19972 - RNA, 22 nt, Artificial Sequence
  SAMD9 targeting guide sequence portion
acuaaguaaauuuugggaaugc

SEQ ID NO: 19973 - RNA, 22 nt, Artificial Sequence
  SAMD9 targeting guide sequence portion
acuaaguacagaagcaaguuug

SEQ ID NO: 19974 - RNA, 22 nt, Artificial Sequence
  SAMD9 targeting guide sequence portion
acuauacauaauucucuugcuu

SEQ ID NO: 19975 - RNA, 22 nt, Artificial Sequence
  SAMD9 targeting guide sequence portion
acuaucucuauauauacugacu

SEQ ID NO: 19976 - RNA, 22 nt, Artificial Sequence
  SAMD9 targeting guide sequence portion
acuaugcuuaauacucauaugc

SEQ ID NO: 19977 - RNA, 22 nt, Artificial Sequence
  SAMD9 targeting guide sequence portion
acuauugccaguuucuucugca

SEQ ID NO: 19978 - RNA, 22 nt, Artificial Sequence
  SAMD9 targeting guide sequence portion
acucauaugcucuauuuacuuu

SEQ ID NO: 19979 - RNA, 22 nt, Artificial Sequence
  SAMD9 targeting guide sequence portion
acugacuggaagcauucccaaa

SEQ ID NO: 19980 - RNA, 22 nt, Artificial Sequence
  SAMD9 targeting guide sequence portion
acuggaagcauucccaaaauuu

SEQ ID NO: 19981 - RNA, 22 nt, Artificial Sequence
  SAMD9 targeting guide sequence portion
acuggcaauagucacauucucu

SEQ ID NO: 19982 - RNA, 22 nt, Artificial Sequence
  SAMD9 targeting guide sequence portion
acuuagugaaugaagcaagaga

SEQ ID NO: 19983 - RNA, 22 nt, Artificial Sequence
  SAMD9 targeting guide sequence portion
acuuaguuucaaauauccuucu

SEQ ID NO: 19984 - RNA, 22 nt, Artificial Sequence
  SAMD9 targeting guide sequence portion
acuugcuucuguacuuaguuuc

SEQ ID NO: 19985 - RNA, 22 nt, Artificial Sequence
  SAMD9 targeting guide sequence portion
acuuuaucuaugucuaucauga

SEQ ID NO: 19986 - RNA, 22 nt, Artificial Sequence
  SAMD9 targeting guide sequence portion
acuuuucccacauaaauugugg

SEQ ID NO: 19987 - RNA, 22 nt, Artificial Sequence
  SAMD9 targeting guide sequence portion
agaaaaaagaaggauauuugaa

SEQ ID NO: 19988 - RNA, 22 nt, Artificial Sequence
  SAMD9 targeting guide sequence portion
agaaaauaagagaaaaaagaag

SEQ ID NO: 19989 - RNA, 22 nt, Artificial Sequence
  SAMD9 targeting guide sequence portion
agaaacuggcaauagucacauu

SEQ ID NO: 19990 - RNA, 22 nt, Artificial Sequence
  SAMD9 targeting guide sequence portion
agaaagaauaccaaauacaaac

SEQ ID NO: 19991 - RNA, 22 nt, Artificial Sequence
  SAMD9 targeting guide sequence portion
agaacguucaauucugcuauag

SEQ ID NO: 19992 - RNA, 22 nt, Artificial Sequence
  SAMD9 targeting guide sequence portion
agaagaaacuggcaauagucac

SEQ ID NO: 19993 - RNA, 22 nt, Artificial Sequence
  SAMD9 targeting guide sequence portion
agaagcaaguuugugagauaca

SEQ ID NO: 19994 - RNA, 22 nt, Artificial Sequence
  SAMD9 targeting guide sequence portion
agaaggauauuugaaacuaagu

SEQ ID NO: 19995 - RNA, 22 nt, Artificial Sequence
  SAMD9 targeting guide sequence portion
agaauaccaaauacaaacacau

SEQ ID NO: 19996 - RNA, 22 nt, Artificial Sequence
  SAMD9 targeting guide sequence portion
agaaugugacuauugccaguuu

SEQ ID NO: 19997 - RNA, 22 nt, Artificial Sequence
  SAMD9 targeting guide sequence portion
agaauuauguauaguaugccac

SEQ ID NO: 19998 - RNA, 22 nt, Artificial Sequence
  SAMD9 targeting guide sequence portion
agaauugaacguucuuaaauaa

SEQ ID NO: 19999 - RNA, 22 nt, Artificial Sequence
  SAMD9 targeting guide sequence portion
agacauagauaaaguaaauaga

SEQ ID NO: 20000 - RNA, 22 nt, Artificial Sequence
  SAMD9 targeting guide sequence portion
agagaaaaaagaaggauauuug

SEQ ID NO: 20001 - RNA, 22 nt, Artificial Sequence
  SAMD9 targeting guide sequence portion
agagaaagaauaccaaauacaa

SEQ ID NO: 20002 - RNA, 22 nt, Artificial Sequence
  SAMD9 targeting guide sequence portion
agagaaugugacuauugccagu

SEQ ID NO: 20003 - RNA, 22 nt, Artificial Sequence
  SAMD9 targeting guide sequence portion
agagaauuauguauaguaugcc

SEQ ID NO: 20004 - RNA, 22 nt, Artificial Sequence
  SAMD9 targeting guide sequence portion
agagauaauucauuggcauauc

SEQ ID NO: 20005 - RNA, 22 nt, Artificial Sequence
  SAMD9 targeting guide sequence portion
agagauaguuuauccuuauuaa

SEQ ID NO: 20006 - RNA, 22 nt, Artificial Sequence
  SAMD9 targeting guide sequence portion
agagcauaugaguauuaagcau

SEQ ID NO: 20007 - RNA, 22 nt, Artificial Sequence
  SAMD9 targeting guide sequence portion
agauaaaguaaauagagcauau

SEQ ID NO: 20008 - RNA, 22 nt, Artificial Sequence
  SAMD9 targeting guide sequence portion
agauaauucauuggcauauccu

SEQ ID NO: 20009 - RNA, 22 nt, Artificial Sequence
  SAMD9 targeting guide sequence portion
agauacaucaugauagacauag

SEQ ID NO: 20010 - RNA, 22 nt, Artificial Sequence
  SAMD9 targeting guide sequence portion
agauaguuuauccuuauuaaug

SEQ ID NO: 20011 - RNA, 22 nt, Artificial Sequence
  SAMD9 targeting guide sequence portion
agcaaacaaucauuaauaagga

SEQ ID NO: 20012 - RNA, 22 nt, Artificial Sequence
  SAMD9 targeting guide sequence portion
agcaaacacacauuauagcaaa

SEQ ID NO: 20013 - RNA, 22 nt, Artificial Sequence
  SAMD9 targeting guide sequence portion
agcaagagaauuauguauagua

SEQ ID NO: 20014 - RNA, 22 nt, Artificial Sequence
  SAMD9 targeting guide sequence portion
agcaaguuugugagauacauca

SEQ ID NO: 20015 - RNA, 22 nt, Artificial Sequence
  SAMD9 targeting guide sequence portion
agcagaauugaacguucuuaaa

SEQ ID NO: 20016 - RNA, 22 nt, Artificial Sequence
  SAMD9 targeting guide sequence portion
agcauaugaguauuaagcauag

SEQ ID NO: 20017 - RNA, 22 nt, Artificial Sequence
  SAMD9 targeting guide sequence portion
agcauucccaaaauuuacuuag

SEQ ID NO: 20018 - RNA, 22 nt, Artificial Sequence
  SAMD9 targeting guide sequence portion
agcucaaaaggauaugccaaug

SEQ ID NO: 20019 - RNA, 22 nt, Artificial Sequence
  SAMD9 targeting guide sequence portion
aggauaaacuaucucuauauau

SEQ ID NO: 20020 - RNA, 22 nt, Artificial Sequence
  SAMD9 targeting guide sequence portion
aggauaugccaaugaauuaucu

SEQ ID NO: 20021 - RNA, 22 nt, Artificial Sequence
  SAMD9 targeting guide sequence portion
aggauauuugaaacuaaguaca

SEQ ID NO: 20022 - RNA, 22 nt, Artificial Sequence
  SAMD9 targeting guide sequence portion
agggaugcagaagaaacuggca

SEQ ID NO: 20023 - RNA, 22 nt, Artificial Sequence
  SAMD9 targeting guide sequence portion
aguaaauagagcauaugaguau

SEQ ID NO: 20024 - RNA, 22 nt, Artificial Sequence
  SAMD9 targeting guide sequence portion
aguaaauuuugggaaugcuucc

SEQ ID NO: 20025 - RNA, 22 nt, Artificial Sequence
  SAMD9 targeting guide sequence portion
aguacagaagcaaguuugugag

SEQ ID NO: 20026 - RNA, 22 nt, Artificial Sequence
  SAMD9 targeting guide sequence portion
aguauauauagagauaguuuau

SEQ ID NO: 20027 - RNA, 22 nt, Artificial Sequence
  SAMD9 targeting guide sequence portion
aguaugccacaauuuauguggg

SEQ ID NO: 20028 - RNA, 22 nt, Artificial Sequence
  SAMD9 targeting guide sequence portion
agucacauucucucaagagaua

SEQ ID NO: 20029 - RNA, 22 nt, Artificial Sequence
  SAMD9 targeting guide sequence portion
agucaguauauauagagauagu

SEQ ID NO: 20030 - RNA, 22 nt, Artificial Sequence
  SAMD9 targeting guide sequence portion
agugaaugaagcaagagaauua

SEQ ID NO: 20031 - RNA, 22 nt, Artificial Sequence
  SAMD9 targeting guide sequence portion
aguguguucauguguuuguauu

SEQ ID NO: 20032 - RNA, 22 nt, Artificial Sequence
  SAMD9 targeting guide sequence portion
aguuuauccuuauuaaugauug

SEQ ID NO: 20033 - RNA, 22 nt, Artificial Sequence
  SAMD9 targeting guide sequence portion
aguuucaaauauccuucuuuuu

SEQ ID NO: 20034 - RNA, 22 nt, Artificial Sequence
  SAMD9 targeting guide sequence portion
aguuucuucugcaucccuccag

SEQ ID NO: 20035 - RNA, 22 nt, Artificial Sequence
  SAMD9 targeting guide sequence portion
aguuugugagauacaucaugau

SEQ ID NO: 20036 - RNA, 22 nt, Artificial Sequence
  SAMD9 targeting guide sequence portion
auaaacuaucucuauauauacu

SEQ ID NO: 20037 - RNA, 22 nt, Artificial Sequence
  SAMD9 targeting guide sequence portion
auaaaguaaauagagcauauga

SEQ ID NO: 20038 - RNA, 22 nt, Artificial Sequence
  SAMD9 targeting guide sequence portion
auaaauuguggcauacuauaca

SEQ ID NO: 20039 - RNA, 22 nt, Artificial Sequence
  SAMD9 targeting guide sequence portion
auaagagaaaaaagaaggauau

SEQ ID NO: 20040 - RNA, 22 nt, Artificial Sequence
  SAMD9 targeting guide sequence portion
auaaggauaaacuaucucuaua

SEQ ID NO: 20041 - RNA, 22 nt, Artificial Sequence
  SAMD9 targeting guide sequence portion
auaauacagcaaacacacauua

SEQ ID NO: 20042 - RNA, 22 nt, Artificial Sequence
  SAMD9 targeting guide sequence portion
auaauguguguuugcuguauua

SEQ ID NO: 20043 - RNA, 22 nt, Artificial Sequence
  SAMD9 targeting guide sequence portion
auaauucauuggcauauccuuu

SEQ ID NO: 20044 - RNA, 22 nt, Artificial Sequence
  SAMD9 targeting guide sequence portion
auaauucucuugcuucauucac

SEQ ID NO: 20045 - RNA, 22 nt, Artificial Sequence
  SAMD9 targeting guide sequence portion
auacaaacacaugaacacacuu

SEQ ID NO: 20046 - RNA, 22 nt, Artificial Sequence
  SAMD9 targeting guide sequence portion
auacagcaaacacacauuauag

SEQ ID NO: 20047 - RNA, 22 nt, Artificial Sequence
  SAMD9 targeting guide sequence portion
auacauaauucucuugcuucau

SEQ ID NO: 20048 - RNA, 22 nt, Artificial Sequence
  SAMD9 targeting guide sequence portion
auacaucaugauagacauagau

SEQ ID NO: 20049 - RNA, 22 nt, Artificial Sequence
  SAMD9 targeting guide sequence portion
auaccaaauacaaacacaugaa

SEQ ID NO: 20050 - RNA, 22 nt, Artificial Sequence
  SAMD9 targeting guide sequence portion
auacuauacauaauucucuugc

SEQ ID NO: 20051 - RNA, 22 nt, Artificial Sequence
  SAMD9 targeting guide sequence portion
auacucauaugcucuauuuacu

SEQ ID NO: 20052 - RNA, 22 nt, Artificial Sequence
  SAMD9 targeting guide sequence portion
auacugacuggaagcauuccca

SEQ ID NO: 20053 - RNA, 22 nt, Artificial Sequence
  SAMD9 targeting guide sequence portion
auagaaaauaagagaaaaaaga

SEQ ID NO: 20054 - RNA, 22 nt, Artificial Sequence
  SAMD9 targeting guide sequence portion
auagacauagauaaaguaaaua

SEQ ID NO: 20055 - RNA, 22 nt, Artificial Sequence
  SAMD9 targeting guide sequence portion
auagagauaguuuauccuuauu

SEQ ID NO: 20056 - RNA, 22 nt, Artificial Sequence
  SAMD9 targeting guide sequence portion
auagagcauaugaguauuaagc

SEQ ID NO: 20057 - RNA, 22 nt, Artificial Sequence
  SAMD9 targeting guide sequence portion
auagauaaaguaaauagagcau

SEQ ID NO: 20058 - RNA, 22 nt, Artificial Sequence
  SAMD9 targeting guide sequence portion
auagcaaacaaucauuaauaag

SEQ ID NO: 20059 - RNA, 22 nt, Artificial Sequence
  SAMD9 targeting guide sequence portion
auagcagaauugaacguucuua

SEQ ID NO: 20060 - RNA, 22 nt, Artificial Sequence
  SAMD9 targeting guide sequence portion
auaguaugccacaauuuaugug

SEQ ID NO: 20061 - RNA, 22 nt, Artificial Sequence
  SAMD9 targeting guide sequence portion
auagucacauucucucaagaga

SEQ ID NO: 20062 - RNA, 22 nt, Artificial Sequence
  SAMD9 targeting guide sequence portion
auaguuuauccuuauuaaugau

SEQ ID NO: 20063 - RNA, 22 nt, Artificial Sequence
  SAMD9 targeting guide sequence portion
auauacugacuggaagcauucc

SEQ ID NO: 20064 - RNA, 22 nt, Artificial Sequence
  SAMD9 targeting guide sequence portion
auauagagauaguuuauccuua

SEQ ID NO: 20065 - RNA, 22 nt, Artificial Sequence
  SAMD9 targeting guide sequence portion
auauauacugacuggaagcauu

SEQ ID NO: 20066 - RNA, 22 nt, Artificial Sequence
  SAMD9 targeting guide sequence portion
auauccuucuuuuuucucuuau

SEQ ID NO: 20067 - RNA, 22 nt, Artificial Sequence
  SAMD9 targeting guide sequence portion
auauccuuuugagcuuuuuaaa

SEQ ID NO: 20068 - RNA, 22 nt, Artificial Sequence
  SAMD9 targeting guide sequence portion
auaugaguauuaagcauaguua

SEQ ID NO: 20069 - RNA, 22 nt, Artificial Sequence
  SAMD9 targeting guide sequence portion
auaugccaaugaauuaucucuu

SEQ ID NO: 20070 - RNA, 22 nt, Artificial Sequence
  SAMD9 targeting guide sequence portion
auaugcucuauuuacuuuaucu

SEQ ID NO: 20071 - RNA, 22 nt, Artificial Sequence
  SAMD9 targeting guide sequence portion
auauuugaaacuaaguacagaa

SEQ ID NO: 20072 - RNA, 22 nt, Artificial Sequence
  SAMD9 targeting guide sequence portion
aucaugauagacauagauaaag

SEQ ID NO: 20073 - RNA, 22 nt, Artificial Sequence
  SAMD9 targeting guide sequence portion
aucaugauguaucucacaaacu

SEQ ID NO: 20074 - RNA, 22 nt, Artificial Sequence
  SAMD9 targeting guide sequence portion
aucauuaauaaggauaaacuau

SEQ ID NO: 20075 - RNA, 22 nt, Artificial Sequence
  SAMD9 targeting guide sequence portion
aucccuccagagaaagaauacc

SEQ ID NO: 20076 - RNA, 22 nt, Artificial Sequence
  SAMD9 targeting guide sequence portion
aucccuuucuaacuaugcuuaa

SEQ ID NO: 20077 - RNA, 22 nt, Artificial Sequence
  SAMD9 targeting guide sequence portion
auccuuauuaaugauuguuugc

SEQ ID NO: 20078 - RNA, 22 nt, Artificial Sequence
  SAMD9 targeting guide sequence portion
auccuucuuuuuucucuuauuu

SEQ ID NO: 20079 - RNA, 22 nt, Artificial Sequence
  SAMD9 targeting guide sequence portion
auccuuuugagcuuuuuaaauu

SEQ ID NO: 20080 - RNA, 22 nt, Artificial Sequence
  SAMD9 targeting guide sequence portion
aucuaugucuaucaugauguau

SEQ ID NO: 20081 - RNA, 22 nt, Artificial Sequence
  SAMD9 targeting guide sequence portion
aucucacaaacuugcuucugua

SEQ ID NO: 20082 - RNA, 22 nt, Artificial Sequence
  SAMD9 targeting guide sequence portion
aucucuauauauacugacugga

SEQ ID NO: 20083 - RNA, 22 nt, Artificial Sequence
  SAMD9 targeting guide sequence portion
aucucuugagagaaugugacua

SEQ ID NO: 20084 - RNA, 22 nt, Artificial Sequence
  SAMD9 targeting guide sequence portion
augaacacacuuuucccacaua

SEQ ID NO: 20085 - RNA, 22 nt, Artificial Sequence
  SAMD9 targeting guide sequence portion
augaagcaagagaauuauguau

SEQ ID NO: 20086 - RNA, 22 nt, Artificial Sequence
  SAMD9 targeting guide sequence portion
augaauuaucucuugagagaau

SEQ ID NO: 20087 - RNA, 22 nt, Artificial Sequence
  SAMD9 targeting guide sequence portion
augaguauuaagcauaguuaga

SEQ ID NO: 20088 - RNA, 22 nt, Artificial Sequence
  SAMD9 targeting guide sequence portion
augauagacauagauaaaguaa

SEQ ID NO: 20089 - RNA, 22 nt, Artificial Sequence
  SAMD9 targeting guide sequence portion
augauguaucucacaaacuugc

SEQ ID NO: 20090 - RNA, 22 nt, Artificial Sequence
  SAMD9 targeting guide sequence portion
augauuguuugcuauaaugugu

SEQ ID NO: 20091 - RNA, 22 nt, Artificial Sequence
  SAMD9 targeting guide sequence portion
augcagaagaaacuggcaauag

SEQ ID NO: 20092 - RNA, 22 nt, Artificial Sequence
  SAMD9 targeting guide sequence portion
augccaaugaauuaucucuuga

SEQ ID NO: 20093 - RNA, 22 nt, Artificial Sequence
  SAMD9 targeting guide sequence portion
augccacaauuuaugugggaaa

SEQ ID NO: 20094 - RNA, 22 nt, Artificial Sequence
  SAMD9 targeting guide sequence portion
augcucuauuuacuuuaucuau

SEQ ID NO: 20095 - RNA, 22 nt, Artificial Sequence
  SAMD9 targeting guide sequence portion
augcuuaauacucauaugcucu

SEQ ID NO: 20096 - RNA, 22 nt, Artificial Sequence
  SAMD9 targeting guide sequence portion
augcuuccagucaguauauaua

SEQ ID NO: 20097 - RNA, 22 nt, Artificial Sequence
  SAMD9 targeting guide sequence portion
auguauaguaugccacaauuua

SEQ ID NO: 20098 - RNA, 22 nt, Artificial Sequence
  SAMD9 targeting guide sequence portion
auguaucucacaaacuugcuuc

SEQ ID NO: 20099 - RNA, 22 nt, Artificial Sequence
  SAMD9 targeting guide sequence portion
augucuaucaugauguaucuca

SEQ ID NO: 20100 - RNA, 22 nt, Artificial Sequence
  SAMD9 targeting guide sequence portion
augugacuauugccaguuucuu

SEQ ID NO: 20101 - RNA, 22 nt, Artificial Sequence
  SAMD9 targeting guide sequence portion
augugggaaaaguguguucaug

SEQ ID NO: 20102 - RNA, 22 nt, Artificial Sequence
  SAMD9 targeting guide sequence portion
auguguguuugcuguauuauuu

SEQ ID NO: 20103 - RNA, 22 nt, Artificial Sequence
  SAMD9 targeting guide sequence portion
auguguuuguauuugguauucu

SEQ ID NO: 20104 - RNA, 22 nt, Artificial Sequence
  SAMD9 targeting guide sequence portion
auuaaugauuguuugcuauaau

SEQ ID NO: 20105 - RNA, 22 nt, Artificial Sequence
  SAMD9 targeting guide sequence portion
auuauagcaaacaaucauuaau

SEQ ID NO: 20106 - RNA, 22 nt, Artificial Sequence
  SAMD9 targeting guide sequence portion
auuaucucuugagagaauguga

SEQ ID NO: 20107 - RNA, 22 nt, Artificial Sequence
  SAMD9 targeting guide sequence portion
auuauguauaguaugccacaau

SEQ ID NO: 20108 - RNA, 22 nt, Artificial Sequence
  SAMD9 targeting guide sequence portion
auuauuuaagaacguucaauuc

SEQ ID NO: 20109 - RNA, 22 nt, Artificial Sequence
  SAMD9 targeting guide sequence portion
auucacuaaguaaauuuuggga

SEQ ID NO: 20110 - RNA, 22 nt, Artificial Sequence
  SAMD9 targeting guide sequence portion
auucauuggcauauccuuuuga

SEQ ID NO: 20111 - RNA, 22 nt, Artificial Sequence
  SAMD9 targeting guide sequence portion
auucccaaaauuuacuuaguga

SEQ ID NO: 20112 - RNA, 22 nt, Artificial Sequence
  SAMD9 targeting guide sequence portion
auucucucaagagauaauucau

SEQ ID NO: 20113 - RNA, 22 nt, Artificial Sequence
  SAMD9 targeting guide sequence portion
auucucuugcuucauucacuaa

SEQ ID NO: 20114 - RNA, 22 nt, Artificial Sequence
  SAMD9 targeting guide sequence portion
auucugcuauagaaaauaagag

SEQ ID NO: 20115 - RNA, 22 nt, Artificial Sequence
  SAMD9 targeting guide sequence portion
auucuuucucuggagggaugca

SEQ ID NO: 20116 - RNA, 22 nt, Artificial Sequence
  SAMD9 targeting guide sequence portion
auugaacguucuuaaauaauac

SEQ ID NO: 20117 - RNA, 22 nt, Artificial Sequence
  SAMD9 targeting guide sequence portion
auugccaguuucuucugcaucc

SEQ ID NO: 20118 - RNA, 22 nt, Artificial Sequence
  SAMD9 targeting guide sequence portion
auuggcauauccuuuugagcuu

SEQ ID NO: 20119 - RNA, 22 nt, Artificial Sequence
  SAMD9 targeting guide sequence portion
auuguggcauacuauacauaau

SEQ ID NO: 20120 - RNA, 22 nt, Artificial Sequence
  SAMD9 targeting guide sequence portion
auuguuugcuauaauguguguu

SEQ ID NO: 20121 - RNA, 22 nt, Artificial Sequence
  SAMD9 targeting guide sequence portion
auuuaaaaagcucaaaaggaua

SEQ ID NO: 20122 - RNA, 22 nt, Artificial Sequence
  SAMD9 targeting guide sequence portion
auuuaagaacguucaauucugc

SEQ ID NO: 20123 - RNA, 22 nt, Artificial Sequence
  SAMD9 targeting guide sequence portion
auuuacuuagugaaugaagcaa

SEQ ID NO: 20124 - RNA, 22 nt, Artificial Sequence
  SAMD9 targeting guide sequence portion
auuuacuuuaucuaugucuauc

SEQ ID NO: 20125 - RNA, 22 nt, Artificial Sequence
  SAMD9 targeting guide sequence portion
auuuaugugggaaaaguguguu

SEQ ID NO: 20126 - RNA, 22 nt, Artificial Sequence
  SAMD9 targeting guide sequence portion
auuugaaacuaaguacagaagc

SEQ ID NO: 20127 - RNA, 22 nt, Artificial Sequence
  SAMD9 targeting guide sequence portion
auuugguauucuuucucuggag

SEQ ID NO: 20128 - RNA, 22 nt, Artificial Sequence
  SAMD9 targeting guide sequence portion
auuuucaaaauuuaaaaagcuc

SEQ ID NO: 20129 - RNA, 22 nt, Artificial Sequence
  SAMD9 targeting guide sequence portion
auuuucuauagcagaauugaac

SEQ ID NO: 20130 - RNA, 22 nt, Artificial Sequence
  SAMD9 targeting guide sequence portion
auuuugggaaugcuuccaguca

SEQ ID NO: 20131 - RNA, 22 nt, Artificial Sequence
  SAMD9 targeting guide sequence portion
caaaaggauaugccaaugaauu

SEQ ID NO: 20132 - RNA, 22 nt, Artificial Sequence
  SAMD9 targeting guide sequence portion
caaaauuuaaaaagcucaaaag

SEQ ID NO: 20133 - RNA, 22 nt, Artificial Sequence
  SAMD9 targeting guide sequence portion
caaaauuuacuuagugaaugaa

SEQ ID NO: 20134 - RNA, 22 nt, Artificial Sequence
  SAMD9 targeting guide sequence portion
caaacaaucauuaauaaggaua

SEQ ID NO: 20135 - RNA, 22 nt, Artificial Sequence
  SAMD9 targeting guide sequence portion
caaacacacauuauagcaaaca

SEQ ID NO: 20136 - RNA, 22 nt, Artificial Sequence
  SAMD9 targeting guide sequence portion
caaacacaugaacacacuuuuc

SEQ ID NO: 20137 - RNA, 22 nt, Artificial Sequence
  SAMD9 targeting guide sequence portion
caaacuugcuucuguacuuagu

SEQ ID NO: 20138 - RNA, 22 nt, Artificial Sequence
  SAMD9 targeting guide sequence portion
caaauacaaacacaugaacaca

SEQ ID NO: 20139 - RNA, 22 nt, Artificial Sequence
  SAMD9 targeting guide sequence portion
caaauauccuucuuuuuucucu

SEQ ID NO: 20140 - RNA, 22 nt, Artificial Sequence
  SAMD9 targeting guide sequence portion
caagagaauuauguauaguaug

SEQ ID NO: 20141 - RNA, 22 nt, Artificial Sequence
  SAMD9 targeting guide sequence portion
caagagauaauucauuggcaua

SEQ ID NO: 20142 - RNA, 22 nt, Artificial Sequence
  SAMD9 targeting guide sequence portion
caaguuugugagauacaucaug

SEQ ID NO: 20143 - RNA, 22 nt, Artificial Sequence
  SAMD9 targeting guide sequence portion
caauagucacauucucucaaga

SEQ ID NO: 20144 - RNA, 22 nt, Artificial Sequence
  SAMD9 targeting guide sequence portion
caaucauuaauaaggauaaacu

SEQ ID NO: 20145 - RNA, 22 nt, Artificial Sequence
  SAMD9 targeting guide sequence portion
caaugaauuaucucuugagaga

SEQ ID NO: 20146 - RNA, 22 nt, Artificial Sequence
  SAMD9 targeting guide sequence portion
caauucugcuauagaaaauaag

SEQ ID NO: 20147 - RNA, 22 nt, Artificial Sequence
  SAMD9 targeting guide sequence portion
caauuuaugugggaaaagugug

SEQ ID NO: 20148 - RNA, 22 nt, Artificial Sequence
  SAMD9 targeting guide sequence portion
cacaaacuugcuucuguacuua

SEQ ID NO: 20149 - RNA, 22 nt, Artificial Sequence
  SAMD9 targeting guide sequence portion
cacaauuuaugugggaaaagug

SEQ ID NO: 20150 - RNA, 22 nt, Artificial Sequence
  SAMD9 targeting guide sequence portion
cacacauuauagcaaacaauca

SEQ ID NO: 20151 - RNA, 22 nt, Artificial Sequence
  SAMD9 targeting guide sequence portion
cacacuuuucccacauaaauug

SEQ ID NO: 20152 - RNA, 22 nt, Artificial Sequence
  SAMD9 targeting guide sequence portion
cacauaaauuguggcauacuau

SEQ ID NO: 20153 - RNA, 22 nt, Artificial Sequence
  SAMD9 targeting guide sequence portion
cacaugaacacacuuuucccac

SEQ ID NO: 20154 - RNA, 22 nt, Artificial Sequence
  SAMD9 targeting guide sequence portion
cacauuauagcaaacaaucauu

SEQ ID NO: 20155 - RNA, 22 nt, Artificial Sequence
  SAMD9 targeting guide sequence portion
cacauucucucaagagauaauu

SEQ ID NO: 20156 - RNA, 22 nt, Artificial Sequence
  SAMD9 targeting guide sequence portion
cacuaaguaaauuuugggaaug

SEQ ID NO: 20157 - RNA, 22 nt, Artificial Sequence
  SAMD9 targeting guide sequence portion
cacuuuucccacauaaauugug

SEQ ID NO: 20158 - RNA, 22 nt, Artificial Sequence
  SAMD9 targeting guide sequence portion
cagaagaaacuggcaauaguca

SEQ ID NO: 20159 - RNA, 22 nt, Artificial Sequence
  SAMD9 targeting guide sequence portion
cagaagcaaguuugugagauac

SEQ ID NO: 20160 - RNA, 22 nt, Artificial Sequence
  SAMD9 targeting guide sequence portion
cagaauugaacguucuuaaaua

SEQ ID NO: 20161 - RNA, 22 nt, Artificial Sequence
  SAMD9 targeting guide sequence portion
cagagaaagaauaccaaauaca

SEQ ID NO: 20162 - RNA, 22 nt, Artificial Sequence
  SAMD9 targeting guide sequence portion
cagcaaacacacauuauagcaa

SEQ ID NO: 20163 - RNA, 22 nt, Artificial Sequence
  SAMD9 targeting guide sequence portion
caguauauauagagauaguuua

SEQ ID NO: 20164 - RNA, 22 nt, Artificial Sequence
  SAMD9 targeting guide sequence portion
cagucaguauauauagagauag

SEQ ID NO: 20165 - RNA, 22 nt, Artificial Sequence
  SAMD9 targeting guide sequence portion
caguuucuucugcaucccucca

SEQ ID NO: 20166 - RNA, 22 nt, Artificial Sequence
  SAMD9 targeting guide sequence portion
cauaaauuguggcauacuauac

SEQ ID NO: 20167 - RNA, 22 nt, Artificial Sequence
  SAMD9 targeting guide sequence portion
cauaauucucuugcuucauuca

SEQ ID NO: 20168 - RNA, 22 nt, Artificial Sequence
  SAMD9 targeting guide sequence portion
cauacuauacauaauucucuug

SEQ ID NO: 20169 - RNA, 22 nt, Artificial Sequence
  SAMD9 targeting guide sequence portion
cauagauaaaguaaauagagca

SEQ ID NO: 20170 - RNA, 22 nt, Artificial Sequence
  SAMD9 targeting guide sequence portion
cauauccuuuugagcuuuuuaa

SEQ ID NO: 20171 - RNA, 22 nt, Artificial Sequence
  SAMD9 targeting guide sequence portion
cauaugaguauuaagcauaguu

SEQ ID NO: 20172 - RNA, 22 nt, Artificial Sequence
  SAMD9 targeting guide sequence portion
cauaugcucuauuuacuuuauc

SEQ ID NO: 20173 - RNA, 22 nt, Artificial Sequence
  SAMD9 targeting guide sequence portion
caucaugauagacauagauaaa

SEQ ID NO: 20174 - RNA, 22 nt, Artificial Sequence
  SAMD9 targeting guide sequence portion
caucccuccagagaaagaauac

SEQ ID NO: 20175 - RNA, 22 nt, Artificial Sequence
  SAMD9 targeting guide sequence portion
caugaacacacuuuucccacau

SEQ ID NO: 20176 - RNA, 22 nt, Artificial Sequence
  SAMD9 targeting guide sequence portion
caugauagacauagauaaagua

SEQ ID NO: 20177 - RNA, 22 nt, Artificial Sequence
  SAMD9 targeting guide sequence portion
caugauguaucucacaaacuug

SEQ ID NO: 20178 - RNA, 22 nt, Artificial Sequence
  SAMD9 targeting guide sequence portion
cauguguuuguauuugguauuc

SEQ ID NO: 20179 - RNA, 22 nt, Artificial Sequence
  SAMD9 targeting guide sequence portion
cauuaauaaggauaaacuaucu

SEQ ID NO: 20180 - RNA, 22 nt, Artificial Sequence
  SAMD9 targeting guide sequence portion
cauuauagcaaacaaucauuaa

SEQ ID NO: 20181 - RNA, 22 nt, Artificial Sequence
  SAMD9 targeting guide sequence portion
cauucacuaaguaaauuuuggg

SEQ ID NO: 20182 - RNA, 22 nt, Artificial Sequence
  SAMD9 targeting guide sequence portion
cauucccaaaauuuacuuagug

SEQ ID NO: 20183 - RNA, 22 nt, Artificial Sequence
  SAMD9 targeting guide sequence portion
cauucucucaagagauaauuca

SEQ ID NO: 20184 - RNA, 22 nt, Artificial Sequence
  SAMD9 targeting guide sequence portion
cauuggcauauccuuuugagcu

SEQ ID NO: 20185 - RNA, 22 nt, Artificial Sequence
  SAMD9 targeting guide sequence portion
ccaaaauuuacuuagugaauga

SEQ ID NO: 20186 - RNA, 22 nt, Artificial Sequence
  SAMD9 targeting guide sequence portion
ccaaauacaaacacaugaacac

SEQ ID NO: 20187 - RNA, 22 nt, Artificial Sequence
  SAMD9 targeting guide sequence portion
ccaaugaauuaucucuugagag

SEQ ID NO: 20188 - RNA, 22 nt, Artificial Sequence
  SAMD9 targeting guide sequence portion
ccacaauuuaugugggaaaagu

SEQ ID NO: 20189 - RNA, 22 nt, Artificial Sequence
  SAMD9 targeting guide sequence portion
ccacauaaauuguggcauacua

SEQ ID NO: 20190 - RNA, 22 nt, Artificial Sequence
  SAMD9 targeting guide sequence portion
ccagagaaagaauaccaaauac

SEQ ID NO: 20191 - RNA, 22 nt, Artificial Sequence
  SAMD9 targeting guide sequence portion
ccagucaguauauauagagaua

SEQ ID NO: 20192 - RNA, 22 nt, Artificial Sequence
  SAMD9 targeting guide sequence portion
ccaguuucuucugcaucccucc

SEQ ID NO: 20193 - RNA, 22 nt, Artificial Sequence
  SAMD9 targeting guide sequence portion
cccaaaauuuacuuagugaaug

SEQ ID NO: 20194 - RNA, 22 nt, Artificial Sequence
  SAMD9 targeting guide sequence portion
cccacauaaauuguggcauacu

SEQ ID NO: 20195 - RNA, 22 nt, Artificial Sequence
  SAMD9 targeting guide sequence portion
cccuccagagaaagaauaccaa

SEQ ID NO: 20196 - RNA, 22 nt, Artificial Sequence
  SAMD9 targeting guide sequence portion
cccuuucuaacuaugcuuaaua

SEQ ID NO: 20197 - RNA, 22 nt, Artificial Sequence
  SAMD9 targeting guide sequence portion
ccuccagagaaagaauaccaaa

SEQ ID NO: 20198 - RNA, 22 nt, Artificial Sequence
  SAMD9 targeting guide sequence portion
ccuuauuaaugauuguuugcua

SEQ ID NO: 20199 - RNA, 22 nt, Artificial Sequence
  SAMD9 targeting guide sequence portion
ccuucuuuuuucucuuauuuuc

SEQ ID NO: 20200 - RNA, 22 nt, Artificial Sequence
  SAMD9 targeting guide sequence portion
ccuuucuaacuaugcuuaauac

SEQ ID NO: 20201 - RNA, 22 nt, Artificial Sequence
  SAMD9 targeting guide sequence portion
ccuuuugagcuuuuuaaauuuu

SEQ ID NO: 20202 - RNA, 22 nt, Artificial Sequence
  SAMD9 targeting guide sequence portion
cguucaauucugcuauagaaaa

SEQ ID NO: 20203 - RNA, 22 nt, Artificial Sequence
  SAMD9 targeting guide sequence portion
cguucuuaaauaauacagcaaa

SEQ ID NO: 20204 - RNA, 22 nt, Artificial Sequence
  SAMD9 targeting guide sequence portion
cuaacuaugcuuaauacucaua

SEQ ID NO: 20205 - RNA, 22 nt, Artificial Sequence
  SAMD9 targeting guide sequence portion
cuaaguaaauuuugggaaugcu

SEQ ID NO: 20206 - RNA, 22 nt, Artificial Sequence
  SAMD9 targeting guide sequence portion
cuaaguacagaagcaaguuugu

SEQ ID NO: 20207 - RNA, 22 nt, Artificial Sequence
  SAMD9 targeting guide sequence portion
cuauaauguguguuugcuguau

SEQ ID NO: 20208 - RNA, 22 nt, Artificial Sequence
  SAMD9 targeting guide sequence portion
cuauacauaauucucuugcuuc

SEQ ID NO: 20209 - RNA, 22 nt, Artificial Sequence
  SAMD9 targeting guide sequence portion
cuauagaaaauaagagaaaaaa

SEQ ID NO: 20210 - RNA, 22 nt, Artificial Sequence
  SAMD9 targeting guide sequence portion
cuauagcagaauugaacguucu

SEQ ID NO: 20211 - RNA, 22 nt, Artificial Sequence
  SAMD9 targeting guide sequence portion
cuauauauacugacuggaagca

SEQ ID NO: 20212 - RNA, 22 nt, Artificial Sequence
  SAMD9 targeting guide sequence portion
cuaucaugauguaucucacaaa

SEQ ID NO: 20213 - RNA, 22 nt, Artificial Sequence
  SAMD9 targeting guide sequence portion
cuaucucuauauauacugacug

SEQ ID NO: 20214 - RNA, 22 nt, Artificial Sequence
  SAMD9 targeting guide sequence portion
cuaugcuuaauacucauaugcu

SEQ ID NO: 20215 - RNA, 22 nt, Artificial Sequence
  SAMD9 targeting guide sequence portion
cuaugucuaucaugauguaucu

SEQ ID NO: 20216 - RNA, 22 nt, Artificial Sequence
  SAMD9 targeting guide sequence portion
cuauugccaguuucuucugcau

SEQ ID NO: 20217 - RNA, 22 nt, Artificial Sequence
  SAMD9 targeting guide sequence portion
cuauuuacuuuaucuaugucua

SEQ ID NO: 20218 - RNA, 22 nt, Artificial Sequence
  SAMD9 targeting guide sequence portion
cucaaaaggauaugccaaugaa

SEQ ID NO: 20219 - RNA, 22 nt, Artificial Sequence
  SAMD9 targeting guide sequence portion
cucaagagauaauucauuggca

SEQ ID NO: 20220 - RNA, 22 nt, Artificial Sequence
  SAMD9 targeting guide sequence portion
cucacaaacuugcuucuguacu

SEQ ID NO: 20221 - RNA, 22 nt, Artificial Sequence
  SAMD9 targeting guide sequence portion
cucauaugcucuauuuacuuua

SEQ ID NO: 20222 - RNA, 22 nt, Artificial Sequence
  SAMD9 targeting guide sequence portion
cuccagagaaagaauaccaaau

SEQ ID NO: 20223 - RNA, 22 nt, Artificial Sequence
  SAMD9 targeting guide sequence portion
cucuauauauacugacuggaag

SEQ ID NO: 20224 - RNA, 22 nt, Artificial Sequence
  SAMD9 targeting guide sequence portion
cucuauuuacuuuaucuauguc

SEQ ID NO: 20225 - RNA, 22 nt, Artificial Sequence
  SAMD9 targeting guide sequence portion
cucucaagagauaauucauugg

SEQ ID NO: 20226 - RNA, 22 nt, Artificial Sequence
  SAMD9 targeting guide sequence portion
cucuggagggaugcagaagaaa

SEQ ID NO: 20227 - RNA, 22 nt, Artificial Sequence
  SAMD9 targeting guide sequence portion
cucuuauuuucuauagcagaau

SEQ ID NO: 20228 - RNA, 22 nt, Artificial Sequence
  SAMD9 targeting guide sequence portion
cucuugagagaaugugacuauu

SEQ ID NO: 20229 - RNA, 22 nt, Artificial Sequence
  SAMD9 targeting guide sequence portion
cucuugcuucauucacuaagua

SEQ ID NO: 20230 - RNA, 22 nt, Artificial Sequence
  SAMD9 targeting guide sequence portion
cugacuggaagcauucccaaaa

SEQ ID NO: 20231 - RNA, 22 nt, Artificial Sequence
  SAMD9 targeting guide sequence portion
cugcaucccuccagagaaagaa

SEQ ID NO: 20232 - RNA, 22 nt, Artificial Sequence
  SAMD9 targeting guide sequence portion
cugcuauagaaaauaagagaaa

SEQ ID NO: 20233 - RNA, 22 nt, Artificial Sequence
  SAMD9 targeting guide sequence portion
cuggaagcauucccaaaauuua

SEQ ID NO: 20234 - RNA, 22 nt, Artificial Sequence
  SAMD9 targeting guide sequence portion
cuggagggaugcagaagaaacu

SEQ ID NO: 20235 - RNA, 22 nt, Artificial Sequence
  SAMD9 targeting guide sequence portion
cuggcaauagucacauucucuc

SEQ ID NO: 20236 - RNA, 22 nt, Artificial Sequence
  SAMD9 targeting guide sequence portion
cuguacuuaguuucaaauaucc

SEQ ID NO: 20237 - RNA, 22 nt, Artificial Sequence
  SAMD9 targeting guide sequence portion
cuguauuauuuaagaacguuca

SEQ ID NO: 20238 - RNA, 22 nt, Artificial Sequence
  SAMD9 targeting guide sequence portion
cuuaaauaauacagcaaacaca

SEQ ID NO: 20239 - RNA, 22 nt, Artificial Sequence
  SAMD9 targeting guide sequence portion
cuuaauacucauaugcucuauu

SEQ ID NO: 20240 - RNA, 22 nt, Artificial Sequence
  SAMD9 targeting guide sequence portion
cuuagugaaugaagcaagagaa

SEQ ID NO: 20241 - RNA, 22 nt, Artificial Sequence
  SAMD9 targeting guide sequence portion
cuuaguuucaaauauccuucuu

SEQ ID NO: 20242 - RNA, 22 nt, Artificial Sequence
  SAMD9 targeting guide sequence portion
cuuauuaaugauuguuugcuau

SEQ ID NO: 20243 - RNA, 22 nt, Artificial Sequence
  SAMD9 targeting guide sequence portion
cuuauuuucuauagcagaauug

SEQ ID NO: 20244 - RNA, 22 nt, Artificial Sequence
  SAMD9 targeting guide sequence portion
cuucauucacuaaguaaauuuu

SEQ ID NO: 20245 - RNA, 22 nt, Artificial Sequence
  SAMD9 targeting guide sequence portion
cuuccagucaguauauauagag

SEQ ID NO: 20246 - RNA, 22 nt, Artificial Sequence
  SAMD9 targeting guide sequence portion
cuucugcaucccuccagagaaa

SEQ ID NO: 20247 - RNA, 22 nt, Artificial Sequence
  SAMD9 targeting guide sequence portion
cuucuguacuuaguuucaaaua

SEQ ID NO: 20248 - RNA, 22 nt, Artificial Sequence
  SAMD9 targeting guide sequence portion
cuucuuuuuucucuuauuuucu

SEQ ID NO: 20249 - RNA, 22 nt, Artificial Sequence
  SAMD9 targeting guide sequence portion
cuugagagaaugugacuauugc

SEQ ID NO: 20250 - RNA, 22 nt, Artificial Sequence
  SAMD9 targeting guide sequence portion
cuugcuucauucacuaaguaaa

SEQ ID NO: 20251 - RNA, 22 nt, Artificial Sequence
  SAMD9 targeting guide sequence portion
cuugcuucuguacuuaguuuca

SEQ ID NO: 20252 - RNA, 22 nt, Artificial Sequence
  SAMD9 targeting guide sequence portion
cuuuaucuaugucuaucaugau

SEQ ID NO: 20253 - RNA, 22 nt, Artificial Sequence
  SAMD9 targeting guide sequence portion
cuuucuaacuaugcuuaauacu

SEQ ID NO: 20254 - RNA, 22 nt, Artificial Sequence
  SAMD9 targeting guide sequence portion
cuuucucuggagggaugcagaa

SEQ ID NO: 20255 - RNA, 22 nt, Artificial Sequence
  SAMD9 targeting guide sequence portion
cuuuucccacauaaauuguggc

SEQ ID NO: 20256 - RNA, 22 nt, Artificial Sequence
  SAMD9 targeting guide sequence portion
cuuuuuucucuuauuuucuaua

SEQ ID NO: 20257 - RNA, 22 nt, Artificial Sequence
  SAMD9 targeting guide sequence portion
gaaaaaagaaggauauuugaaa

SEQ ID NO: 20258 - RNA, 22 nt, Artificial Sequence
  SAMD9 targeting guide sequence portion
gaaaaguguguucauguguuug

SEQ ID NO: 20259 - RNA, 22 nt, Artificial Sequence
  SAMD9 targeting guide sequence portion
gaaaauaagagaaaaaagaagg

SEQ ID NO: 20260 - RNA, 22 nt, Artificial Sequence
  SAMD9 targeting guide sequence portion
gaaacuaaguacagaagcaagu

SEQ ID NO: 20261 - RNA, 22 nt, Artificial Sequence
  SAMD9 targeting guide sequence portion
gaaacuggcaauagucacauuc

SEQ ID NO: 20262 - RNA, 22 nt, Artificial Sequence
  SAMD9 targeting guide sequence portion
gaaagaauaccaaauacaaaca

SEQ ID NO: 20263 - RNA, 22 nt, Artificial Sequence
  SAMD9 targeting guide sequence portion
gaacacacuuuucccacauaaa

SEQ ID NO: 20264 - RNA, 22 nt, Artificial Sequence
  SAMD9 targeting guide sequence portion
gaacguucaauucugcuauaga

SEQ ID NO: 20265 - RNA, 22 nt, Artificial Sequence
  SAMD9 targeting guide sequence portion
gaacguucuuaaauaauacagc

SEQ ID NO: 20266 - RNA, 22 nt, Artificial Sequence
  SAMD9 targeting guide sequence portion
gaagaaacuggcaauagucaca

SEQ ID NO: 20267 - RNA, 22 nt, Artificial Sequence
  SAMD9 targeting guide sequence portion
gaagcaagagaauuauguauag

SEQ ID NO: 20268 - RNA, 22 nt, Artificial Sequence
  SAMD9 targeting guide sequence portion
gaagcaaguuugugagauacau

SEQ ID NO: 20269 - RNA, 22 nt, Artificial Sequence
  SAMD9 targeting guide sequence portion
gaagcauucccaaaauuuacuu

SEQ ID NO: 20270 - RNA, 22 nt, Artificial Sequence
  SAMD9 targeting guide sequence portion
gaaggauauuugaaacuaagua

SEQ ID NO: 20271 - RNA, 22 nt, Artificial Sequence
  SAMD9 targeting guide sequence portion
gaauaccaaauacaaacacaug

SEQ ID NO: 20272 - RNA, 22 nt, Artificial Sequence
  SAMD9 targeting guide sequence portion
gaaugaagcaagagaauuaugu

SEQ ID NO: 20273 - RNA, 22 nt, Artificial Sequence
  SAMD9 targeting guide sequence portion
gaaugcuuccagucaguauaua

SEQ ID NO: 20274 - RNA, 22 nt, Artificial Sequence
  SAMD9 targeting guide sequence portion
gaaugugacuauugccaguuuc

SEQ ID NO: 20275 - RNA, 22 nt, Artificial Sequence
  SAMD9 targeting guide sequence portion
gaauuaucucuugagagaaugu

SEQ ID NO: 20276 - RNA, 22 nt, Artificial Sequence
  SAMD9 targeting guide sequence portion
gaauuauguauaguaugccaca

SEQ ID NO: 20277 - RNA, 22 nt, Artificial Sequence
  SAMD9 targeting guide sequence portion
gaauugaacguucuuaaauaau

SEQ ID NO: 20278 - RNA, 22 nt, Artificial Sequence
  SAMD9 targeting guide sequence portion
gacauagauaaaguaaauagag

SEQ ID NO: 20279 - RNA, 22 nt, Artificial Sequence
  SAMD9 targeting guide sequence portion
gacuauugccaguuucuucugc

SEQ ID NO: 20280 - RNA, 22 nt, Artificial Sequence
  SAMD9 targeting guide sequence portion
gacuggaagcauucccaaaauu

SEQ ID NO: 20281 - RNA, 22 nt, Artificial Sequence
  SAMD9 targeting guide sequence portion
gagaaaaaagaaggauauuuga

SEQ ID NO: 20282 - RNA, 22 nt, Artificial Sequence
  SAMD9 targeting guide sequence portion
gagaaagaauaccaaauacaaa

SEQ ID NO: 20283 - RNA, 22 nt, Artificial Sequence
  SAMD9 targeting guide sequence portion
gagaaugugacuauugccaguu

SEQ ID NO: 20284 - RNA, 22 nt, Artificial Sequence
  SAMD9 targeting guide sequence portion
gagaauuauguauaguaugcca

SEQ ID NO: 20285 - RNA, 22 nt, Artificial Sequence
  SAMD9 targeting guide sequence portion
gagagaaugugacuauugccag

SEQ ID NO: 20286 - RNA, 22 nt, Artificial Sequence
  SAMD9 targeting guide sequence portion
gagauaauucauuggcauaucc

SEQ ID NO: 20287 - RNA, 22 nt, Artificial Sequence
  SAMD9 targeting guide sequence portion
gagauacaucaugauagacaua

SEQ ID NO: 20288 - RNA, 22 nt, Artificial Sequence
  SAMD9 targeting guide sequence portion
gagauaguuuauccuuauuaau

SEQ ID NO: 20289 - RNA, 22 nt, Artificial Sequence
  SAMD9 targeting guide sequence portion
gagcauaugaguauuaagcaua

SEQ ID NO: 20290 - RNA, 22 nt, Artificial Sequence
  SAMD9 targeting guide sequence portion
gagggaugcagaagaaacuggc

SEQ ID NO: 20291 - RNA, 22 nt, Artificial Sequence
  SAMD9 targeting guide sequence portion
gauaaacuaucucuauauauac

SEQ ID NO: 20292 - RNA, 22 nt, Artificial Sequence
  SAMD9 targeting guide sequence portion
gauaaaguaaauagagcauaug

SEQ ID NO: 20293 - RNA, 22 nt, Artificial Sequence
  SAMD9 targeting guide sequence portion
gauaauucauuggcauauccuu

SEQ ID NO: 20294 - RNA, 22 nt, Artificial Sequence
  SAMD9 targeting guide sequence portion
gauacaucaugauagacauaga

SEQ ID NO: 20295 - RNA, 22 nt, Artificial Sequence
  SAMD9 targeting guide sequence portion
gauagacauagauaaaguaaau

SEQ ID NO: 20296 - RNA, 22 nt, Artificial Sequence
  SAMD9 targeting guide sequence portion
gauaguuuauccuuauuaauga

SEQ ID NO: 20297 - RNA, 22 nt, Artificial Sequence
  SAMD9 targeting guide sequence portion
gauaugccaaugaauuaucucu

SEQ ID NO: 20298 - RNA, 22 nt, Artificial Sequence
  SAMD9 targeting guide sequence portion
gauauuugaaacuaaguacaga

SEQ ID NO: 20299 - RNA, 22 nt, Artificial Sequence
  SAMD9 targeting guide sequence portion
gaugcagaagaaacuggcaaua

SEQ ID NO: 20300 - RNA, 22 nt, Artificial Sequence
  SAMD9 targeting guide sequence portion
gauguaucucacaaacuugcuu

SEQ ID NO: 20301 - RNA, 22 nt, Artificial Sequence
  SAMD9 targeting guide sequence portion
gauuguuugcuauaaugugugu

SEQ ID NO: 20302 - RNA, 22 nt, Artificial Sequence
  SAMD9 targeting guide sequence portion
gcaaacaaucauuaauaaggau

SEQ ID NO: 20303 - RNA, 22 nt, Artificial Sequence
  SAMD9 targeting guide sequence portion
gcaaacacacauuauagcaaac

SEQ ID NO: 20304 - RNA, 22 nt, Artificial Sequence
  SAMD9 targeting guide sequence portion
gcaagagaauuauguauaguau

SEQ ID NO: 20305 - RNA, 22 nt, Artificial Sequence
  SAMD9 targeting guide sequence portion
gcaaguuugugagauacaucau

SEQ ID NO: 20306 - RNA, 22 nt, Artificial Sequence
  SAMD9 targeting guide sequence portion
gcaauagucacauucucucaag

SEQ ID NO: 20307 - RNA, 22 nt, Artificial Sequence
  SAMD9 targeting guide sequence portion
gcagaagaaacuggcaauaguc

SEQ ID NO: 20308 - RNA, 22 nt, Artificial Sequence
  SAMD9 targeting guide sequence portion
gcagaauugaacguucuuaaau

SEQ ID NO: 20309 - RNA, 22 nt, Artificial Sequence
  SAMD9 targeting guide sequence portion
gcauacuauacauaauucucuu

SEQ ID NO: 20310 - RNA, 22 nt, Artificial Sequence
  SAMD9 targeting guide sequence portion
gcauauccuuuugagcuuuuua

SEQ ID NO: 20311 - RNA, 22 nt, Artificial Sequence
  SAMD9 targeting guide sequence portion
gcauaugaguauuaagcauagu

SEQ ID NO: 20312 - RNA, 22 nt, Artificial Sequence
  SAMD9 targeting guide sequence portion
gcaucccuccagagaaagaaua

SEQ ID NO: 20313 - RNA, 22 nt, Artificial Sequence
  SAMD9 targeting guide sequence portion
gcauucccaaaauuuacuuagu

SEQ ID NO: 20314 - RNA, 22 nt, Artificial Sequence
  SAMD9 targeting guide sequence portion
gccaaugaauuaucucuugaga

SEQ ID NO: 20315 - RNA, 22 nt, Artificial Sequence
  SAMD9 targeting guide sequence portion
gccacaauuuaugugggaaaag

SEQ ID NO: 20316 - RNA, 22 nt, Artificial Sequence
  SAMD9 targeting guide sequence portion
gccaguuucuucugcaucccuc

SEQ ID NO: 20317 - RNA, 22 nt, Artificial Sequence
  SAMD9 targeting guide sequence portion
gcuauaauguguguuugcugua

SEQ ID NO: 20318 - RNA, 22 nt, Artificial Sequence
  SAMD9 targeting guide sequence portion
gcuauagaaaauaagagaaaaa

SEQ ID NO: 20319 - RNA, 22 nt, Artificial Sequence
  SAMD9 targeting guide sequence portion
gcucaaaaggauaugccaauga

SEQ ID NO: 20320 - RNA, 22 nt, Artificial Sequence
  SAMD9 targeting guide sequence portion
gcucuauuuacuuuaucuaugu

SEQ ID NO: 20321 - RNA, 22 nt, Artificial Sequence
  SAMD9 targeting guide sequence portion
gcuguauuauuuaagaacguuc

SEQ ID NO: 20322 - RNA, 22 nt, Artificial Sequence
  SAMD9 targeting guide sequence portion
gcuuaauacucauaugcucuau

SEQ ID NO: 20323 - RNA, 22 nt, Artificial Sequence
  SAMD9 targeting guide sequence portion
gcuucauucacuaaguaaauuu

SEQ ID NO: 20324 - RNA, 22 nt, Artificial Sequence
  SAMD9 targeting guide sequence portion
gcuuccagucaguauauauaga

SEQ ID NO: 20325 - RNA, 22 nt, Artificial Sequence
  SAMD9 targeting guide sequence portion
gcuucuguacuuaguuucaaau

SEQ ID NO: 20326 - RNA, 22 nt, Artificial Sequence
  SAMD9 targeting guide sequence portion
ggaaaaguguguucauguguuu

SEQ ID NO: 20327 - RNA, 22 nt, Artificial Sequence
  SAMD9 targeting guide sequence portion
ggaagcauucccaaaauuuacu

SEQ ID NO: 20328 - RNA, 22 nt, Artificial Sequence
  SAMD9 targeting guide sequence portion
ggaaugcuuccagucaguauau

SEQ ID NO: 20329 - RNA, 22 nt, Artificial Sequence
  SAMD9 targeting guide sequence portion
ggagggaugcagaagaaacugg

SEQ ID NO: 20330 - RNA, 22 nt, Artificial Sequence
  SAMD9 targeting guide sequence portion
ggauaaacuaucucuauauaua

SEQ ID NO: 20331 - RNA, 22 nt, Artificial Sequence
  SAMD9 targeting guide sequence portion
ggauaugccaaugaauuaucuc

SEQ ID NO: 20332 - RNA, 22 nt, Artificial Sequence
  SAMD9 targeting guide sequence portion
ggauauuugaaacuaaguacag

SEQ ID NO: 20333 - RNA, 22 nt, Artificial Sequence
  SAMD9 targeting guide sequence portion
ggaugcagaagaaacuggcaau

SEQ ID NO: 20334 - RNA, 22 nt, Artificial Sequence
  SAMD9 targeting guide sequence portion
ggcaauagucacauucucucaa

SEQ ID NO: 20335 - RNA, 22 nt, Artificial Sequence
  SAMD9 targeting guide sequence portion
ggcauacuauacauaauucucu

SEQ ID NO: 20336 - RNA, 22 nt, Artificial Sequence
  SAMD9 targeting guide sequence portion
ggcauauccuuuugagcuuuuu

SEQ ID NO: 20337 - RNA, 22 nt, Artificial Sequence
  SAMD9 targeting guide sequence portion
gggaaaaguguguucauguguu

SEQ ID NO: 20338 - RNA, 22 nt, Artificial Sequence
  SAMD9 targeting guide sequence portion
gggaaugcuuccagucaguaua

SEQ ID NO: 20339 - RNA, 22 nt, Artificial Sequence
  SAMD9 targeting guide sequence portion
gggaugcagaagaaacuggcaa

SEQ ID NO: 20340 - RNA, 22 nt, Artificial Sequence
  SAMD9 targeting guide sequence portion
gguauucuuucucuggagggau

SEQ ID NO: 20341 - RNA, 22 nt, Artificial Sequence
  SAMD9 targeting guide sequence portion
guaaauagagcauaugaguauu

SEQ ID NO: 20342 - RNA, 22 nt, Artificial Sequence
  SAMD9 targeting guide sequence portion
guaaauuuugggaaugcuucca

SEQ ID NO: 20343 - RNA, 22 nt, Artificial Sequence
  SAMD9 targeting guide sequence portion
guacagaagcaaguuugugaga

SEQ ID NO: 20344 - RNA, 22 nt, Artificial Sequence
  SAMD9 targeting guide sequence portion
guacuuaguuucaaauauccuu

SEQ ID NO: 20345 - RNA, 22 nt, Artificial Sequence
  SAMD9 targeting guide sequence portion
guauaguaugccacaauuuaug

SEQ ID NO: 20346 - RNA, 22 nt, Artificial Sequence
  SAMD9 targeting guide sequence portion
guauauauagagauaguuuauc

SEQ ID NO: 20347 - RNA, 22 nt, Artificial Sequence
  SAMD9 targeting guide sequence portion
guaucucacaaacuugcuucug

SEQ ID NO: 20348 - RNA, 22 nt, Artificial Sequence
  SAMD9 targeting guide sequence portion
guaugccacaauuuauguggga

SEQ ID NO: 20349 - RNA, 22 nt, Artificial Sequence
  SAMD9 targeting guide sequence portion
guauuauuuaagaacguucaau

SEQ ID NO: 20350 - RNA, 22 nt, Artificial Sequence
  SAMD9 targeting guide sequence portion
guauucuuucucuggagggaug

SEQ ID NO: 20351 - RNA, 22 nt, Artificial Sequence
  SAMD9 targeting guide sequence portion
guauuugguauucuuucucugg

SEQ ID NO: 20352 - RNA, 22 nt, Artificial Sequence
  SAMD9 targeting guide sequence portion
gucacauucucucaagagauaa

SEQ ID NO: 20353 - RNA, 22 nt, Artificial Sequence
  SAMD9 targeting guide sequence portion
gucaguauauauagagauaguu

SEQ ID NO: 20354 - RNA, 22 nt, Artificial Sequence
  SAMD9 targeting guide sequence portion
gucuaucaugauguaucucaca

SEQ ID NO: 20355 - RNA, 22 nt, Artificial Sequence
  SAMD9 targeting guide sequence portion
gugaaugaagcaagagaauuau

SEQ ID NO: 20356 - RNA, 22 nt, Artificial Sequence
  SAMD9 targeting guide sequence portion
gugacuauugccaguuucuucu

SEQ ID NO: 20357 - RNA, 22 nt, Artificial Sequence
  SAMD9 targeting guide sequence portion
gugagauacaucaugauagaca

SEQ ID NO: 20358 - RNA, 22 nt, Artificial Sequence
  SAMD9 targeting guide sequence portion
guggcauacuauacauaauucu

SEQ ID NO: 20359 - RNA, 22 nt, Artificial Sequence
  SAMD9 targeting guide sequence portion
gugggaaaaguguguucaugug

SEQ ID NO: 20360 - RNA, 22 nt, Artificial Sequence
  SAMD9 targeting guide sequence portion
guguguucauguguuuguauuu

SEQ ID NO: 20361 - RNA, 22 nt, Artificial Sequence
  SAMD9 targeting guide sequence portion
guguguuugcuguauuauuuaa

SEQ ID NO: 20362 - RNA, 22 nt, Artificial Sequence
  SAMD9 targeting guide sequence portion
guguucauguguuuguauuugg

SEQ ID NO: 20363 - RNA, 22 nt, Artificial Sequence
  SAMD9 targeting guide sequence portion
guguuugcuguauuauuuaaga

SEQ ID NO: 20364 - RNA, 22 nt, Artificial Sequence
  SAMD9 targeting guide sequence portion
guguuuguauuugguauucuuu

SEQ ID NO: 20365 - RNA, 22 nt, Artificial Sequence
  SAMD9 targeting guide sequence portion
guucaauucugcuauagaaaau

SEQ ID NO: 20366 - RNA, 22 nt, Artificial Sequence
  SAMD9 targeting guide sequence portion
guucauguguuuguauuuggua

SEQ ID NO: 20367 - RNA, 22 nt, Artificial Sequence
  SAMD9 targeting guide sequence portion
guucuuaaauaauacagcaaac

SEQ ID NO: 20368 - RNA, 22 nt, Artificial Sequence
  SAMD9 targeting guide sequence portion
guuuauccuuauuaaugauugu

SEQ ID NO: 20369 - RNA, 22 nt, Artificial Sequence
  SAMD9 targeting guide sequence portion
guuucaaauauccuucuuuuuu

SEQ ID NO: 20370 - RNA, 22 nt, Artificial Sequence
  SAMD9 targeting guide sequence portion
guuucuucugcaucccuccaga

SEQ ID NO: 20371 - RNA, 22 nt, Artificial Sequence
  SAMD9 targeting guide sequence portion
guuugcuauaauguguguuugc

SEQ ID NO: 20372 - RNA, 22 nt, Artificial Sequence
  SAMD9 targeting guide sequence portion
guuugcuguauuauuuaagaac

SEQ ID NO: 20373 - RNA, 22 nt, Artificial Sequence
  SAMD9 targeting guide sequence portion
guuuguauuugguauucuuucu

SEQ ID NO: 20374 - RNA, 22 nt, Artificial Sequence
  SAMD9 targeting guide sequence portion
guuugugagauacaucaugaua

SEQ ID NO: 20375 - RNA, 22 nt, Artificial Sequence
  SAMD9 targeting guide sequence portion
uaaaaagcucaaaaggauaugc

SEQ ID NO: 20376 - RNA, 22 nt, Artificial Sequence
  SAMD9 targeting guide sequence portion
uaaacuaucucuauauauacug

SEQ ID NO: 20377 - RNA, 22 nt, Artificial Sequence
  SAMD9 targeting guide sequence portion
uaaaguaaauagagcauaugag

SEQ ID NO: 20378 - RNA, 22 nt, Artificial Sequence
  SAMD9 targeting guide sequence portion
uaaauaauacagcaaacacaca

SEQ ID NO: 20379 - RNA, 22 nt, Artificial Sequence
  SAMD9 targeting guide sequence portion
uaaauagagcauaugaguauua

SEQ ID NO: 20380 - RNA, 22 nt, Artificial Sequence
  SAMD9 targeting guide sequence portion
uaaauuguggcauacuauacau

SEQ ID NO: 20381 - RNA, 22 nt, Artificial Sequence
  SAMD9 targeting guide sequence portion
uaaauuuugggaaugcuuccag

SEQ ID NO: 20382 - RNA, 22 nt, Artificial Sequence
  SAMD9 targeting guide sequence portion
uaacuaugcuuaauacucauau

SEQ ID NO: 20383 - RNA, 22 nt, Artificial Sequence
  SAMD9 targeting guide sequence portion
uaagaacguucaauucugcuau

SEQ ID NO: 20384 - RNA, 22 nt, Artificial Sequence
  SAMD9 targeting guide sequence portion
uaagagaaaaaagaaggauauu

SEQ ID NO: 20385 - RNA, 22 nt, Artificial Sequence
  SAMD9 targeting guide sequence portion
uaaggauaaacuaucucuauau

SEQ ID NO: 20386 - RNA, 22 nt, Artificial Sequence
  SAMD9 targeting guide sequence portion
uaaguaaauuuugggaaugcuu

SEQ ID NO: 20387 - RNA, 22 nt, Artificial Sequence
  SAMD9 targeting guide sequence portion
uaaguacagaagcaaguuugug

SEQ ID NO: 20388 - RNA, 22 nt, Artificial Sequence
  SAMD9 targeting guide sequence portion
uaauacagcaaacacacauuau

SEQ ID NO: 20389 - RNA, 22 nt, Artificial Sequence
  SAMD9 targeting guide sequence portion
uaauacucauaugcucuauuua

SEQ ID NO: 20390 - RNA, 22 nt, Artificial Sequence
  SAMD9 targeting guide sequence portion
uaaugauuguuugcuauaaugu

SEQ ID NO: 20391 - RNA, 22 nt, Artificial Sequence
  SAMD9 targeting guide sequence portion
uaauguguguuugcuguauuau

SEQ ID NO: 20392 - RNA, 22 nt, Artificial Sequence
  SAMD9 targeting guide sequence portion
uaauucauuggcauauccuuuu

SEQ ID NO: 20393 - RNA, 22 nt, Artificial Sequence
  SAMD9 targeting guide sequence portion
uaauucucuugcuucauucacu

SEQ ID NO: 20394 - RNA, 22 nt, Artificial Sequence
  SAMD9 targeting guide sequence portion
uacaaacacaugaacacacuuu

SEQ ID NO: 20395 - RNA, 22 nt, Artificial Sequence
  SAMD9 targeting guide sequence portion
uacagaagcaaguuugugagau

SEQ ID NO: 20396 - RNA, 22 nt, Artificial Sequence
  SAMD9 targeting guide sequence portion
uacagcaaacacacauuauagc

SEQ ID NO: 20397 - RNA, 22 nt, Artificial Sequence
  SAMD9 targeting guide sequence portion
uacauaauucucuugcuucauu

SEQ ID NO: 20398 - RNA, 22 nt, Artificial Sequence
  SAMD9 targeting guide sequence portion
uacaucaugauagacauagaua

SEQ ID NO: 20399 - RNA, 22 nt, Artificial Sequence
  SAMD9 targeting guide sequence portion
uaccaaauacaaacacaugaac

SEQ ID NO: 20400 - RNA, 22 nt, Artificial Sequence
  SAMD9 targeting guide sequence portion
uacuauacauaauucucuugcu

SEQ ID NO: 20401 - RNA, 22 nt, Artificial Sequence
  SAMD9 targeting guide sequence portion
uacucauaugcucuauuuacuu

SEQ ID NO: 20402 - RNA, 22 nt, Artificial Sequence
  SAMD9 targeting guide sequence portion
uacugacuggaagcauucccaa

SEQ ID NO: 20403 - RNA, 22 nt, Artificial Sequence
  SAMD9 targeting guide sequence portion
uacuuagugaaugaagcaagag

SEQ ID NO: 20404 - RNA, 22 nt, Artificial Sequence
  SAMD9 targeting guide sequence portion
uacuuaguuucaaauauccuuc

SEQ ID NO: 20405 - RNA, 22 nt, Artificial Sequence
  SAMD9 targeting guide sequence portion
uacuuuaucuaugucuaucaug

SEQ ID NO: 20406 - RNA, 22 nt, Artificial Sequence
  SAMD9 targeting guide sequence portion
uagaaaauaagagaaaaaagaa

SEQ ID NO: 20407 - RNA, 22 nt, Artificial Sequence
  SAMD9 targeting guide sequence portion
uagacauagauaaaguaaauag

SEQ ID NO: 20408 - RNA, 22 nt, Artificial Sequence
  SAMD9 targeting guide sequence portion
uagagauaguuuauccuuauua

SEQ ID NO: 20409 - RNA, 22 nt, Artificial Sequence
  SAMD9 targeting guide sequence portion
uagagcauaugaguauuaagca

SEQ ID NO: 20410 - RNA, 22 nt, Artificial Sequence
  SAMD9 targeting guide sequence portion
uagauaaaguaaauagagcaua

SEQ ID NO: 20411 - RNA, 22 nt, Artificial Sequence
  SAMD9 targeting guide sequence portion
uagcaaacaaucauuaauaagg

SEQ ID NO: 20412 - RNA, 22 nt, Artificial Sequence
  SAMD9 targeting guide sequence portion
uagcagaauugaacguucuuaa

SEQ ID NO: 20413 - RNA, 22 nt, Artificial Sequence
  SAMD9 targeting guide sequence portion
uaguaugccacaauuuaugugg

SEQ ID NO: 20414 - RNA, 22 nt, Artificial Sequence
  SAMD9 targeting guide sequence portion
uagucacauucucucaagagau

SEQ ID NO: 20415 - RNA, 22 nt, Artificial Sequence
  SAMD9 targeting guide sequence portion
uagugaaugaagcaagagaauu

SEQ ID NO: 20416 - RNA, 22 nt, Artificial Sequence
  SAMD9 targeting guide sequence portion
uaguuuauccuuauuaaugauu

SEQ ID NO: 20417 - RNA, 22 nt, Artificial Sequence
  SAMD9 targeting guide sequence portion
uaguuucaaauauccuucuuuu

SEQ ID NO: 20418 - RNA, 22 nt, Artificial Sequence
  SAMD9 targeting guide sequence portion
uauaauguguguuugcuguauu

SEQ ID NO: 20419 - RNA, 22 nt, Artificial Sequence
  SAMD9 targeting guide sequence portion
uauacauaauucucuugcuuca

SEQ ID NO: 20420 - RNA, 22 nt, Artificial Sequence
  SAMD9 targeting guide sequence portion
uauacugacuggaagcauuccc

SEQ ID NO: 20421 - RNA, 22 nt, Artificial Sequence
  SAMD9 targeting guide sequence portion
uauagaaaauaagagaaaaaag

SEQ ID NO: 20422 - RNA, 22 nt, Artificial Sequence
  SAMD9 targeting guide sequence portion
uauagagauaguuuauccuuau

SEQ ID NO: 20423 - RNA, 22 nt, Artificial Sequence
  SAMD9 targeting guide sequence portion
uauagcaaacaaucauuaauaa

SEQ ID NO: 20424 - RNA, 22 nt, Artificial Sequence
  SAMD9 targeting guide sequence portion
uauagcagaauugaacguucuu

SEQ ID NO: 20425 - RNA, 22 nt, Artificial Sequence
  SAMD9 targeting guide sequence portion
uauaguaugccacaauuuaugu

SEQ ID NO: 20426 - RNA, 22 nt, Artificial Sequence
  SAMD9 targeting guide sequence portion
uauauacugacuggaagcauuc

SEQ ID NO: 20427 - RNA, 22 nt, Artificial Sequence
  SAMD9 targeting guide sequence portion
uauauauacugacuggaagcau

SEQ ID NO: 20428 - RNA, 22 nt, Artificial Sequence
  SAMD9 targeting guide sequence portion
uaucaugauguaucucacaaac

SEQ ID NO: 20429 - RNA, 22 nt, Artificial Sequence
  SAMD9 targeting guide sequence portion
uauccuuauuaaugauuguuug

SEQ ID NO: 20430 - RNA, 22 nt, Artificial Sequence
  SAMD9 targeting guide sequence portion
uauccuucuuuuuucucuuauu

SEQ ID NO: 20431 - RNA, 22 nt, Artificial Sequence
  SAMD9 targeting guide sequence portion
uauccuuuugagcuuuuuaaau

SEQ ID NO: 20432 - RNA, 22 nt, Artificial Sequence
  SAMD9 targeting guide sequence portion
uaucuaugucuaucaugaugua

SEQ ID NO: 20433 - RNA, 22 nt, Artificial Sequence
  SAMD9 targeting guide sequence portion
uaucucacaaacuugcuucugu

SEQ ID NO: 20434 - RNA, 22 nt, Artificial Sequence
  SAMD9 targeting guide sequence portion
uaucucuauauauacugacugg

SEQ ID NO: 20435 - RNA, 22 nt, Artificial Sequence
  SAMD9 targeting guide sequence portion
uaucucuugagagaaugugacu

SEQ ID NO: 20436 - RNA, 22 nt, Artificial Sequence
  SAMD9 targeting guide sequence portion
uaugaguauuaagcauaguuag

SEQ ID NO: 20437 - RNA, 22 nt, Artificial Sequence
  SAMD9 targeting guide sequence portion
uaugccaaugaauuaucucuug

SEQ ID NO: 20438 - RNA, 22 nt, Artificial Sequence
  SAMD9 targeting guide sequence portion
uaugccacaauuuaugugggaa

SEQ ID NO: 20439 - RNA, 22 nt, Artificial Sequence
  SAMD9 targeting guide sequence portion
uaugcucuauuuacuuuaucua

SEQ ID NO: 20440 - RNA, 22 nt, Artificial Sequence
  SAMD9 targeting guide sequence portion
uaugcuuaauacucauaugcuc

SEQ ID NO: 20441 - RNA, 22 nt, Artificial Sequence
  SAMD9 targeting guide sequence portion
uauguauaguaugccacaauuu

SEQ ID NO: 20442 - RNA, 22 nt, Artificial Sequence
  SAMD9 targeting guide sequence portion
uaugucuaucaugauguaucuc

SEQ ID NO: 20443 - RNA, 22 nt, Artificial Sequence
  SAMD9 targeting guide sequence portion
uaugugggaaaaguguguucau

SEQ ID NO: 20444 - RNA, 22 nt, Artificial Sequence
  SAMD9 targeting guide sequence portion
uauuaaugauuguuugcuauaa

SEQ ID NO: 20445 - RNA, 22 nt, Artificial Sequence
  SAMD9 targeting guide sequence portion
uauuauuuaagaacguucaauu

SEQ ID NO: 20446 - RNA, 22 nt, Artificial Sequence
  SAMD9 targeting guide sequence portion
uauucuuucucuggagggaugc

SEQ ID NO: 20447 - RNA, 22 nt, Artificial Sequence
  SAMD9 targeting guide sequence portion
uauugccaguuucuucugcauc

SEQ ID NO: 20448 - RNA, 22 nt, Artificial Sequence
  SAMD9 targeting guide sequence portion
uauuuaagaacguucaauucug

SEQ ID NO: 20449 - RNA, 22 nt, Artificial Sequence
  SAMD9 targeting guide sequence portion
uauuuacuuuaucuaugucuau

SEQ ID NO: 20450 - RNA, 22 nt, Artificial Sequence
  SAMD9 targeting guide sequence portion
uauuugaaacuaaguacagaag

SEQ ID NO: 20451 - RNA, 22 nt, Artificial Sequence
  SAMD9 targeting guide sequence portion
uauuugguauucuuucucugga

SEQ ID NO: 20452 - RNA, 22 nt, Artificial Sequence
  SAMD9 targeting guide sequence portion
uauuuucuauagcagaauugaa

SEQ ID NO: 20453 - RNA, 22 nt, Artificial Sequence
  SAMD9 targeting guide sequence portion
ucaaaaggauaugccaaugaau

SEQ ID NO: 20454 - RNA, 22 nt, Artificial Sequence
  SAMD9 targeting guide sequence portion
ucaaaauuuaaaaagcucaaaa

SEQ ID NO: 20455 - RNA, 22 nt, Artificial Sequence
  SAMD9 targeting guide sequence portion
ucaaauauccuucuuuuuucuc

SEQ ID NO: 20456 - RNA, 22 nt, Artificial Sequence
  SAMD9 targeting guide sequence portion
ucaagagauaauucauuggcau

SEQ ID NO: 20457 - RNA, 22 nt, Artificial Sequence
  SAMD9 targeting guide sequence portion
ucaauucugcuauagaaaauaa

SEQ ID NO: 20458 - RNA, 22 nt, Artificial Sequence
  SAMD9 targeting guide sequence portion
ucacaaacuugcuucuguacuu

SEQ ID NO: 20459 - RNA, 22 nt, Artificial Sequence
  SAMD9 targeting guide sequence portion
ucacauucucucaagagauaau

SEQ ID NO: 20460 - RNA, 22 nt, Artificial Sequence
  SAMD9 targeting guide sequence portion
ucacuaaguaaauuuugggaau

SEQ ID NO: 20461 - RNA, 22 nt, Artificial Sequence
  SAMD9 targeting guide sequence portion
ucaguauauauagagauaguuu

SEQ ID NO: 20462 - RNA, 22 nt, Artificial Sequence
  SAMD9 targeting guide sequence portion
ucauaugcucuauuuacuuuau

SEQ ID NO: 20463 - RNA, 22 nt, Artificial Sequence
  SAMD9 targeting guide sequence portion
ucaugauagacauagauaaagu

SEQ ID NO: 20464 - RNA, 22 nt, Artificial Sequence
  SAMD9 targeting guide sequence portion
ucaugauguaucucacaaacuu

SEQ ID NO: 20465 - RNA, 22 nt, Artificial Sequence
  SAMD9 targeting guide sequence portion
ucauguguuuguauuugguauu

SEQ ID NO: 20466 - RNA, 22 nt, Artificial Sequence
  SAMD9 targeting guide sequence portion
ucauuaauaaggauaaacuauc

SEQ ID NO: 20467 - RNA, 22 nt, Artificial Sequence
  SAMD9 targeting guide sequence portion
ucauucacuaaguaaauuuugg

SEQ ID NO: 20468 - RNA, 22 nt, Artificial Sequence
  SAMD9 targeting guide sequence portion
ucauuggcauauccuuuugagc

SEQ ID NO: 20469 - RNA, 22 nt, Artificial Sequence
  SAMD9 targeting guide sequence portion
uccagagaaagaauaccaaaua

SEQ ID NO: 20470 - RNA, 22 nt, Artificial Sequence
  SAMD9 targeting guide sequence portion
uccagucaguauauauagagau

SEQ ID NO: 20471 - RNA, 22 nt, Artificial Sequence
  SAMD9 targeting guide sequence portion
ucccaaaauuuacuuagugaau

SEQ ID NO: 20472 - RNA, 22 nt, Artificial Sequence
  SAMD9 targeting guide sequence portion
ucccacauaaauuguggcauac

SEQ ID NO: 20473 - RNA, 22 nt, Artificial Sequence
  SAMD9 targeting guide sequence portion
ucccuccagagaaagaauacca

SEQ ID NO: 20474 - RNA, 22 nt, Artificial Sequence
  SAMD9 targeting guide sequence portion
ucccuuucuaacuaugcuuaau

SEQ ID NO: 20475 - RNA, 22 nt, Artificial Sequence
  SAMD9 targeting guide sequence portion
uccuuauuaaugauuguuugcu

SEQ ID NO: 20476 - RNA, 22 nt, Artificial Sequence
  SAMD9 targeting guide sequence portion
uccuucuuuuuucucuuauuuu

SEQ ID NO: 20477 - RNA, 22 nt, Artificial Sequence
  SAMD9 targeting guide sequence portion
uccuuuugagcuuuuuaaauuu

SEQ ID NO: 20478 - RNA, 22 nt, Artificial Sequence
  SAMD9 targeting guide sequence portion
ucuaacuaugcuuaauacucau

SEQ ID NO: 20479 - RNA, 22 nt, Artificial Sequence
  SAMD9 targeting guide sequence portion
ucuauagcagaauugaacguuc

SEQ ID NO: 20480 - RNA, 22 nt, Artificial Sequence
  SAMD9 targeting guide sequence portion
ucuauauauacugacuggaagc

SEQ ID NO: 20481 - RNA, 22 nt, Artificial Sequence
  SAMD9 targeting guide sequence portion
ucuaucaugauguaucucacaa

SEQ ID NO: 20482 - RNA, 22 nt, Artificial Sequence
  SAMD9 targeting guide sequence portion
ucuaugucuaucaugauguauc

SEQ ID NO: 20483 - RNA, 22 nt, Artificial Sequence
  SAMD9 targeting guide sequence portion
ucuauuuacuuuaucuaugucu

SEQ ID NO: 20484 - RNA, 22 nt, Artificial Sequence
  SAMD9 targeting guide sequence portion
ucucaagagauaauucauuggc

SEQ ID NO: 20485 - RNA, 22 nt, Artificial Sequence
  SAMD9 targeting guide sequence portion
ucucacaaacuugcuucuguac

SEQ ID NO: 20486 - RNA, 22 nt, Artificial Sequence
  SAMD9 targeting guide sequence portion
ucucuauauauacugacuggaa

SEQ ID NO: 20487 - RNA, 22 nt, Artificial Sequence
  SAMD9 targeting guide sequence portion
ucucucaagagauaauucauug

SEQ ID NO: 20488 - RNA, 22 nt, Artificial Sequence
  SAMD9 targeting guide sequence portion
ucucuggagggaugcagaagaa

SEQ ID NO: 20489 - RNA, 22 nt, Artificial Sequence
  SAMD9 targeting guide sequence portion
ucucuuauuuucuauagcagaa

SEQ ID NO: 20490 - RNA, 22 nt, Artificial Sequence
  SAMD9 targeting guide sequence portion
ucucuugagagaaugugacuau

SEQ ID NO: 20491 - RNA, 22 nt, Artificial Sequence
  SAMD9 targeting guide sequence portion
ucucuugcuucauucacuaagu

SEQ ID NO: 20492 - RNA, 22 nt, Artificial Sequence
  SAMD9 targeting guide sequence portion
ucugcaucccuccagagaaaga

SEQ ID NO: 20493 - RNA, 22 nt, Artificial Sequence
  SAMD9 targeting guide sequence portion
ucugcuauagaaaauaagagaa

SEQ ID NO: 20494 - RNA, 22 nt, Artificial Sequence
  SAMD9 targeting guide sequence portion
ucuggagggaugcagaagaaac

SEQ ID NO: 20495 - RNA, 22 nt, Artificial Sequence
  SAMD9 targeting guide sequence portion
ucuguacuuaguuucaaauauc

SEQ ID NO: 20496 - RNA, 22 nt, Artificial Sequence
  SAMD9 targeting guide sequence portion
ucuuaaauaauacagcaaacac

SEQ ID NO: 20497 - RNA, 22 nt, Artificial Sequence
  SAMD9 targeting guide sequence portion
ucuuauuuucuauagcagaauu

SEQ ID NO: 20498 - RNA, 22 nt, Artificial Sequence
  SAMD9 targeting guide sequence portion
ucuucugcaucccuccagagaa

SEQ ID NO: 20499 - RNA, 22 nt, Artificial Sequence
  SAMD9 targeting guide sequence portion
ucuugagagaaugugacuauug

SEQ ID NO: 20500 - RNA, 22 nt, Artificial Sequence
  SAMD9 targeting guide sequence portion
ucuugcuucauucacuaaguaa

SEQ ID NO: 20501 - RNA, 22 nt, Artificial Sequence
  SAMD9 targeting guide sequence portion
ucuuucucuggagggaugcaga

SEQ ID NO: 20502 - RNA, 22 nt, Artificial Sequence
  SAMD9 targeting guide sequence portion
ucuuuuuucucuuauuuucuau

SEQ ID NO: 20503 - RNA, 22 nt, Artificial Sequence
  SAMD9 targeting guide sequence portion
ugaaacuaaguacagaagcaag

SEQ ID NO: 20504 - RNA, 22 nt, Artificial Sequence
  SAMD9 targeting guide sequence portion
ugaacacacuuuucccacauaa

SEQ ID NO: 20505 - RNA, 22 nt, Artificial Sequence
  SAMD9 targeting guide sequence portion
ugaacguucuuaaauaauacag

SEQ ID NO: 20506 - RNA, 22 nt, Artificial Sequence
  SAMD9 targeting guide sequence portion
ugaagcaagagaauuauguaua

SEQ ID NO: 20507 - RNA, 22 nt, Artificial Sequence
  SAMD9 targeting guide sequence portion
ugaaugaagcaagagaauuaug

SEQ ID NO: 20508 - RNA, 22 nt, Artificial Sequence
  SAMD9 targeting guide sequence portion
ugaauuaucucuugagagaaug

SEQ ID NO: 20509 - RNA, 22 nt, Artificial Sequence
  SAMD9 targeting guide sequence portion
ugacuauugccaguuucuucug

SEQ ID NO: 20510 - RNA, 22 nt, Artificial Sequence
  SAMD9 targeting guide sequence portion
ugacuggaagcauucccaaaau

SEQ ID NO: 20511 - RNA, 22 nt, Artificial Sequence
  SAMD9 targeting guide sequence portion
ugagagaaugugacuauugcca

SEQ ID NO: 20512 - RNA, 22 nt, Artificial Sequence
  SAMD9 targeting guide sequence portion
ugagauacaucaugauagacau

SEQ ID NO: 20513 - RNA, 22 nt, Artificial Sequence
  SAMD9 targeting guide sequence portion
ugaguauuaagcauaguuagaa

SEQ ID NO: 20514 - RNA, 22 nt, Artificial Sequence
  SAMD9 targeting guide sequence portion
ugauagacauagauaaaguaaa

SEQ ID NO: 20515 - RNA, 22 nt, Artificial Sequence
  SAMD9 targeting guide sequence portion
ugauguaucucacaaacuugcu

SEQ ID NO: 20516 - RNA, 22 nt, Artificial Sequence
  SAMD9 targeting guide sequence portion
ugauuguuugcuauaaugugug

SEQ ID NO: 20517 - RNA, 22 nt, Artificial Sequence
  SAMD9 targeting guide sequence portion
ugcagaagaaacuggcaauagu

SEQ ID NO: 20518 - RNA, 22 nt, Artificial Sequence
  SAMD9 targeting guide sequence portion
ugcaucccuccagagaaagaau

SEQ ID NO: 20519 - RNA, 22 nt, Artificial Sequence
  SAMD9 targeting guide sequence portion
ugccaaugaauuaucucuugag

SEQ ID NO: 20520 - RNA, 22 nt, Artificial Sequence
  SAMD9 targeting guide sequence portion
ugccacaauuuaugugggaaaa

SEQ ID NO: 20521 - RNA, 22 nt, Artificial Sequence
  SAMD9 targeting guide sequence portion
ugccaguuucuucugcaucccu

SEQ ID NO: 20522 - RNA, 22 nt, Artificial Sequence
  SAMD9 targeting guide sequence portion
ugcuauaauguguguuugcugu

SEQ ID NO: 20523 - RNA, 22 nt, Artificial Sequence
  SAMD9 targeting guide sequence portion
ugcuauagaaaauaagagaaaa

SEQ ID NO: 20524 - RNA, 22 nt, Artificial Sequence
  SAMD9 targeting guide sequence portion
ugcucuauuuacuuuaucuaug

SEQ ID NO: 20525 - RNA, 22 nt, Artificial Sequence
  SAMD9 targeting guide sequence portion
ugcuguauuauuuaagaacguu

SEQ ID NO: 20526 - RNA, 22 nt, Artificial Sequence
  SAMD9 targeting guide sequence portion
ugcuuaauacucauaugcucua

SEQ ID NO: 20527 - RNA, 22 nt, Artificial Sequence
  SAMD9 targeting guide sequence portion
ugcuucauucacuaaguaaauu

SEQ ID NO: 20528 - RNA, 22 nt, Artificial Sequence
  SAMD9 targeting guide sequence portion
ugcuuccagucaguauauauag

SEQ ID NO: 20529 - RNA, 22 nt, Artificial Sequence
  SAMD9 targeting guide sequence portion
ugcuucuguacuuaguuucaaa

SEQ ID NO: 20530 - RNA, 22 nt, Artificial Sequence
  SAMD9 targeting guide sequence portion
uggaagcauucccaaaauuuac

SEQ ID NO: 20531 - RNA, 22 nt, Artificial Sequence
  SAMD9 targeting guide sequence portion
uggagggaugcagaagaaacug

SEQ ID NO: 20532 - RNA, 22 nt, Artificial Sequence
  SAMD9 targeting guide sequence portion
uggcaauagucacauucucuca

SEQ ID NO: 20533 - RNA, 22 nt, Artificial Sequence
  SAMD9 targeting guide sequence portion
uggcauacuauacauaauucuc

SEQ ID NO: 20534 - RNA, 22 nt, Artificial Sequence
  SAMD9 targeting guide sequence portion
uggcauauccuuuugagcuuuu

SEQ ID NO: 20535 - RNA, 22 nt, Artificial Sequence
  SAMD9 targeting guide sequence portion
ugggaaaaguguguucaugugu

SEQ ID NO: 20536 - RNA, 22 nt, Artificial Sequence
  SAMD9 targeting guide sequence portion
ugggaaugcuuccagucaguau

SEQ ID NO: 20537 - RNA, 22 nt, Artificial Sequence
  SAMD9 targeting guide sequence portion
ugguauucuuucucuggaggga

SEQ ID NO: 20538 - RNA, 22 nt, Artificial Sequence
  SAMD9 targeting guide sequence portion
uguacuuaguuucaaauauccu

SEQ ID NO: 20539 - RNA, 22 nt, Artificial Sequence
  SAMD9 targeting guide sequence portion
uguauaguaugccacaauuuau

SEQ ID NO: 20540 - RNA, 22 nt, Artificial Sequence
  SAMD9 targeting guide sequence portion
uguaucucacaaacuugcuucu

SEQ ID NO: 20541 - RNA, 22 nt, Artificial Sequence
  SAMD9 targeting guide sequence portion
uguauuauuuaagaacguucaa

SEQ ID NO: 20542 - RNA, 22 nt, Artificial Sequence
  SAMD9 targeting guide sequence portion
uguauuugguauucuuucucug

SEQ ID NO: 20543 - RNA, 22 nt, Artificial Sequence
  SAMD9 targeting guide sequence portion
ugucuaucaugauguaucucac

SEQ ID NO: 20544 - RNA, 22 nt, Artificial Sequence
  SAMD9 targeting guide sequence portion
ugugacuauugccaguuucuuc

SEQ ID NO: 20545 - RNA, 22 nt, Artificial Sequence
  SAMD9 targeting guide sequence portion
ugugagauacaucaugauagac

SEQ ID NO: 20546 - RNA, 22 nt, Artificial Sequence
  SAMD9 targeting guide sequence portion
uguggcauacuauacauaauuc

SEQ ID NO: 20547 - RNA, 22 nt, Artificial Sequence
  SAMD9 targeting guide sequence portion
ugugggaaaaguguguucaugu

SEQ ID NO: 20548 - RNA, 22 nt, Artificial Sequence
  SAMD9 targeting guide sequence portion
uguguguuugcuguauuauuua

SEQ ID NO: 20549 - RNA, 22 nt, Artificial Sequence
  SAMD9 targeting guide sequence portion
uguguucauguguuuguauuug

SEQ ID NO: 20550 - RNA, 22 nt, Artificial Sequence
  SAMD9 targeting guide sequence portion
uguguuugcuguauuauuuaag

SEQ ID NO: 20551 - RNA, 22 nt, Artificial Sequence
  SAMD9 targeting guide sequence portion
uguguuuguauuugguauucuu

SEQ ID NO: 20552 - RNA, 22 nt, Artificial Sequence
  SAMD9 targeting guide sequence portion
uguucauguguuuguauuuggu

SEQ ID NO: 20553 - RNA, 22 nt, Artificial Sequence
  SAMD9 targeting guide sequence portion
uguuugcuauaauguguguuug

SEQ ID NO: 20554 - RNA, 22 nt, Artificial Sequence
  SAMD9 targeting guide sequence portion
uguuugcuguauuauuuaagaa

SEQ ID NO: 20555 - RNA, 22 nt, Artificial Sequence
  SAMD9 targeting guide sequence portion
uguuuguauuugguauucuuuc

SEQ ID NO: 20556 - RNA, 22 nt, Artificial Sequence
  SAMD9 targeting guide sequence portion
uuaaaaagcucaaaaggauaug

SEQ ID NO: 20557 - RNA, 22 nt, Artificial Sequence
  SAMD9 targeting guide sequence portion
uuaaauaauacagcaaacacac

SEQ ID NO: 20558 - RNA, 22 nt, Artificial Sequence
  SAMD9 targeting guide sequence portion
uuaagaacguucaauucugcua

SEQ ID NO: 20559 - RNA, 22 nt, Artificial Sequence
  SAMD9 targeting guide sequence portion
uuaauacucauaugcucuauuu

SEQ ID NO: 20560 - RNA, 22 nt, Artificial Sequence
  SAMD9 targeting guide sequence portion
uuaaugauuguuugcuauaaug

SEQ ID NO: 20561 - RNA, 22 nt, Artificial Sequence
  SAMD9 targeting guide sequence portion
uuacuuagugaaugaagcaaga

SEQ ID NO: 20562 - RNA, 22 nt, Artificial Sequence
  SAMD9 targeting guide sequence portion
uuacuuuaucuaugucuaucau

SEQ ID NO: 20563 - RNA, 22 nt, Artificial Sequence
  SAMD9 targeting guide sequence portion
uuagugaaugaagcaagagaau

SEQ ID NO: 20564 - RNA, 22 nt, Artificial Sequence
  SAMD9 targeting guide sequence portion
uuaguuucaaauauccuucuuu

SEQ ID NO: 20565 - RNA, 22 nt, Artificial Sequence
  SAMD9 targeting guide sequence portion
uuauagcaaacaaucauuaaua

SEQ ID NO: 20566 - RNA, 22 nt, Artificial Sequence
  SAMD9 targeting guide sequence portion
uuauccuuauuaaugauuguuu

SEQ ID NO: 20567 - RNA, 22 nt, Artificial Sequence
  SAMD9 targeting guide sequence portion
uuaucuaugucuaucaugaugu

SEQ ID NO: 20568 - RNA, 22 nt, Artificial Sequence
  SAMD9 targeting guide sequence portion
uuaucucuugagagaaugugac

SEQ ID NO: 20569 - RNA, 22 nt, Artificial Sequence
  SAMD9 targeting guide sequence portion
uuauguauaguaugccacaauu

SEQ ID NO: 20570 - RNA, 22 nt, Artificial Sequence
  SAMD9 targeting guide sequence portion
uuaugugggaaaaguguguuca

SEQ ID NO: 20571 - RNA, 22 nt, Artificial Sequence
  SAMD9 targeting guide sequence portion
uuauuaaugauuguuugcuaua

SEQ ID NO: 20572 - RNA, 22 nt, Artificial Sequence
  SAMD9 targeting guide sequence portion
uuauuuaagaacguucaauucu

SEQ ID NO: 20573 - RNA, 22 nt, Artificial Sequence
  SAMD9 targeting guide sequence portion
uuauuuucuauagcagaauuga

SEQ ID NO: 20574 - RNA, 22 nt, Artificial Sequence
  SAMD9 targeting guide sequence portion
uucaaaauuuaaaaagcucaaa

SEQ ID NO: 20575 - RNA, 22 nt, Artificial Sequence
  SAMD9 targeting guide sequence portion
uucaaauauccuucuuuuuucu

SEQ ID NO: 20576 - RNA, 22 nt, Artificial Sequence
  SAMD9 targeting guide sequence portion
uucaauucugcuauagaaaaua

SEQ ID NO: 20577 - RNA, 22 nt, Artificial Sequence
  SAMD9 targeting guide sequence portion
uucacuaaguaaauuuugggaa

SEQ ID NO: 20578 - RNA, 22 nt, Artificial Sequence
  SAMD9 targeting guide sequence portion
uucauguguuuguauuugguau

SEQ ID NO: 20579 - RNA, 22 nt, Artificial Sequence
  SAMD9 targeting guide sequence portion
uucauucacuaaguaaauuuug

SEQ ID NO: 20580 - RNA, 22 nt, Artificial Sequence
  SAMD9 targeting guide sequence portion
uucauuggcauauccuuuugag

SEQ ID NO: 20581 - RNA, 22 nt, Artificial Sequence
  SAMD9 targeting guide sequence portion
uuccagucaguauauauagaga

SEQ ID NO: 20582 - RNA, 22 nt, Artificial Sequence
  SAMD9 targeting guide sequence portion
uucccaaaauuuacuuagugaa

SEQ ID NO: 20583 - RNA, 22 nt, Artificial Sequence
  SAMD9 targeting guide sequence portion
uucccacauaaauuguggcaua

SEQ ID NO: 20584 - RNA, 22 nt, Artificial Sequence
  SAMD9 targeting guide sequence portion
uucuaacuaugcuuaauacuca

SEQ ID NO: 20585 - RNA, 22 nt, Artificial Sequence
  SAMD9 targeting guide sequence portion
uucuauagcagaauugaacguu

SEQ ID NO: 20586 - RNA, 22 nt, Artificial Sequence
  SAMD9 targeting guide sequence portion
uucucucaagagauaauucauu

SEQ ID NO: 20587 - RNA, 22 nt, Artificial Sequence
  SAMD9 targeting guide sequence portion
uucucuggagggaugcagaaga

SEQ ID NO: 20588 - RNA, 22 nt, Artificial Sequence
  SAMD9 targeting guide sequence portion
uucucuuauuuucuauagcaga

SEQ ID NO: 20589 - RNA, 22 nt, Artificial Sequence
  SAMD9 targeting guide sequence portion
uucucuugcuucauucacuaag

SEQ ID NO: 20590 - RNA, 22 nt, Artificial Sequence
  SAMD9 targeting guide sequence portion
uucugcaucccuccagagaaag

SEQ ID NO: 20591 - RNA, 22 nt, Artificial Sequence
  SAMD9 targeting guide sequence portion
uucugcuauagaaaauaagaga

SEQ ID NO: 20592 - RNA, 22 nt, Artificial Sequence
  SAMD9 targeting guide sequence portion
uucuguacuuaguuucaaauau

SEQ ID NO: 20593 - RNA, 22 nt, Artificial Sequence
  SAMD9 targeting guide sequence portion
uucuuaaauaauacagcaaaca

SEQ ID NO: 20594 - RNA, 22 nt, Artificial Sequence
  SAMD9 targeting guide sequence portion
uucuucugcaucccuccagaga

SEQ ID NO: 20595 - RNA, 22 nt, Artificial Sequence
  SAMD9 targeting guide sequence portion
uucuuucucuggagggaugcag

SEQ ID NO: 20596 - RNA, 22 nt, Artificial Sequence
  SAMD9 targeting guide sequence portion
uucuuuuuucucuuauuuucua

SEQ ID NO: 20597 - RNA, 22 nt, Artificial Sequence
  SAMD9 targeting guide sequence portion
uugaaacuaaguacagaagcaa

SEQ ID NO: 20598 - RNA, 22 nt, Artificial Sequence
  SAMD9 targeting guide sequence portion
uugaacguucuuaaauaauaca

SEQ ID NO: 20599 - RNA, 22 nt, Artificial Sequence
  SAMD9 targeting guide sequence portion
uugagagaaugugacuauugcc

SEQ ID NO: 20600 - RNA, 22 nt, Artificial Sequence
  SAMD9 targeting guide sequence portion
uugccaguuucuucugcauccc

SEQ ID NO: 20601 - RNA, 22 nt, Artificial Sequence
  SAMD9 targeting guide sequence portion
uugcuauaauguguguuugcug

SEQ ID NO: 20602 - RNA, 22 nt, Artificial Sequence
  SAMD9 targeting guide sequence portion
uugcuguauuauuuaagaacgu

SEQ ID NO: 20603 - RNA, 22 nt, Artificial Sequence
  SAMD9 targeting guide sequence portion
uugcuucauucacuaaguaaau

SEQ ID NO: 20604 - RNA, 22 nt, Artificial Sequence
  SAMD9 targeting guide sequence portion
uugcuucuguacuuaguuucaa

SEQ ID NO: 20605 - RNA, 22 nt, Artificial Sequence
  SAMD9 targeting guide sequence portion
uuggcauauccuuuugagcuuu

SEQ ID NO: 20606 - RNA, 22 nt, Artificial Sequence
  SAMD9 targeting guide sequence portion
uugggaaugcuuccagucagua

SEQ ID NO: 20607 - RNA, 22 nt, Artificial Sequence
  SAMD9 targeting guide sequence portion
uugguauucuuucucuggaggg

SEQ ID NO: 20608 - RNA, 22 nt, Artificial Sequence
  SAMD9 targeting guide sequence portion
uuguauuugguauucuuucucu

SEQ ID NO: 20609 - RNA, 22 nt, Artificial Sequence
  SAMD9 targeting guide sequence portion
uugugagauacaucaugauaga

SEQ ID NO: 20610 - RNA, 22 nt, Artificial Sequence
  SAMD9 targeting guide sequence portion
uuguggcauacuauacauaauu

SEQ ID NO: 20611 - RNA, 22 nt, Artificial Sequence
  SAMD9 targeting guide sequence portion
uuguuugcuauaauguguguuu

SEQ ID NO: 20612 - RNA, 22 nt, Artificial Sequence
  SAMD9 targeting guide sequence portion
uuuaaaaagcucaaaaggauau

SEQ ID NO: 20613 - RNA, 22 nt, Artificial Sequence
  SAMD9 targeting guide sequence portion
uuuaagaacguucaauucugcu

SEQ ID NO: 20614 - RNA, 22 nt, Artificial Sequence
  SAMD9 targeting guide sequence portion
uuuacuuagugaaugaagcaag

SEQ ID NO: 20615 - RNA, 22 nt, Artificial Sequence
  SAMD9 targeting guide sequence portion
uuuacuuuaucuaugucuauca

SEQ ID NO: 20616 - RNA, 22 nt, Artificial Sequence
  SAMD9 targeting guide sequence portion
uuuauccuuauuaaugauuguu

SEQ ID NO: 20617 - RNA, 22 nt, Artificial Sequence
  SAMD9 targeting guide sequence portion
uuuaucuaugucuaucaugaug

SEQ ID NO: 20618 - RNA, 22 nt, Artificial Sequence
  SAMD9 targeting guide sequence portion
uuuaugugggaaaaguguguuc

SEQ ID NO: 20619 - RNA, 22 nt, Artificial Sequence
  SAMD9 targeting guide sequence portion
uuucaaaauuuaaaaagcucaa

SEQ ID NO: 20620 - RNA, 22 nt, Artificial Sequence
  SAMD9 targeting guide sequence portion
uuucaaauauccuucuuuuuuc

SEQ ID NO: 20621 - RNA, 22 nt, Artificial Sequence
  SAMD9 targeting guide sequence portion
uuucccacauaaauuguggcau

SEQ ID NO: 20622 - RNA, 22 nt, Artificial Sequence
  SAMD9 targeting guide sequence portion
uuucuaacuaugcuuaauacuc

SEQ ID NO: 20623 - RNA, 22 nt, Artificial Sequence
  SAMD9 targeting guide sequence portion
uuucuauagcagaauugaacgu

SEQ ID NO: 20624 - RNA, 22 nt, Artificial Sequence
  SAMD9 targeting guide sequence portion
uuucucuggagggaugcagaag

SEQ ID NO: 20625 - RNA, 22 nt, Artificial Sequence
  SAMD9 targeting guide sequence portion
uuucucuuauuuucuauagcag

SEQ ID NO: 20626 - RNA, 22 nt, Artificial Sequence
  SAMD9 targeting guide sequence portion
uuucuucugcaucccuccagag

SEQ ID NO: 20627 - RNA, 22 nt, Artificial Sequence
  SAMD9 targeting guide sequence portion
uuugaaacuaaguacagaagca

SEQ ID NO: 20628 - RNA, 22 nt, Artificial Sequence
  SAMD9 targeting guide sequence portion
uuugcuauaauguguguuugcu

SEQ ID NO: 20629 - RNA, 22 nt, Artificial Sequence
  SAMD9 targeting guide sequence portion
uuugcuguauuauuuaagaacg

SEQ ID NO: 20630 - RNA, 22 nt, Artificial Sequence
  SAMD9 targeting guide sequence portion
uuugggaaugcuuccagucagu

SEQ ID NO: 20631 - RNA, 22 nt, Artificial Sequence
  SAMD9 targeting guide sequence portion
uuugguauucuuucucuggagg

SEQ ID NO: 20632 - RNA, 22 nt, Artificial Sequence
  SAMD9 targeting guide sequence portion
uuuguauuugguauucuuucuc

SEQ ID NO: 20633 - RNA, 22 nt, Artificial Sequence
  SAMD9 targeting guide sequence portion
uuugugagauacaucaugauag

SEQ ID NO: 20634 - RNA, 22 nt, Artificial Sequence
  SAMD9 targeting guide sequence portion
uuuucaaaauuuaaaaagcuca

SEQ ID NO: 20635 - RNA, 22 nt, Artificial Sequence
  SAMD9 targeting guide sequence portion
uuuucccacauaaauuguggca

SEQ ID NO: 20636 - RNA, 22 nt, Artificial Sequence
  SAMD9 targeting guide sequence portion
uuuucuauagcagaauugaacg

SEQ ID NO: 20637 - RNA, 22 nt, Artificial Sequence
  SAMD9 targeting guide sequence portion
uuuucucuuauuuucuauagca

SEQ ID NO: 20638 - RNA, 22 nt, Artificial Sequence
  SAMD9 targeting guide sequence portion
uuuugggaaugcuuccagucag

SEQ ID NO: 20639 - RNA, 22 nt, Artificial Sequence
  SAMD9 targeting guide sequence portion
uuuuucucuuauuuucuauagc

SEQ ID NO: 20640 - RNA, 22 nt, Artificial Sequence
  SAMD9 targeting guide sequence portion
uuuuuucucuuauuuucuauag

SEQ ID NO: 20641 - RNA, 20 nt, Artificial Sequence
  Example guide sequence portion
aaaaaaauguacuugguucc

SEQ ID NO: 20642 - RNA, 17 nt, Artificial Sequence
  17 nucleotide guide sequence 1
aaaauguacuugguucc

SEQ ID NO: 20643 - RNA, 17 nt, Artificial Sequence
  17 nucleotide guide sequence 2
aaaaauguacuugguuc

SEQ ID NO: 20644 - RNA, 17 nt, Artificial Sequence
  17 nucleotide guide sequence 3
aaaaaauguacuugguu

SEQ ID NO: 20645 - RNA, 17 nt, Artificial Sequence
  17 nucleotide guide sequence 4
aaaaaaauguacuuggu

SEQ ID NO: 20646 - protein, 1348 aa, Artificial Sequence
  OMNI-103 CRISPR nuclease
MSIKSDYFLGLDIGTDSIGWAVTDPEYHILRRKGKALWGIRLFDAANTAAERRTFRTSRRRIQRRRQRIRLLQELFAEEMVKLDPGFFQRLSDSAFWQEDKQEQQIYSLFTCENYTDVDYYREYPTIYHLRSALIQEKKEFDLRLLYLALHHLMKHRGHFLFNGSINNVTSFHTTFQTFADCLYDEFDIELECDSEDRFAEILKDKHARKTGKCSELEIICHIEKSNKQLKELFKLITGMKASLSVVFGDDELAEIEHNKISFSESSYDEVRLALEDEIQERTGILDIFHAVYSWAILADILEGGEYEGNSYLSVAKVSTYKKHGDDLRLLRTLVREYCPDHYKSFFSVSGKENYCAYAGTLKKNGKKQPIKRCSQEDFYKALKKLLNQMPTEQPEVKDIFIEIENGTFLPLQVSKDNGVIPYQVNKMELEKILQNAEEYLPFLKNIDEECGKTVSKKIIDLFEFRIPYYVGPLNTAKGENCWMVRKEAGRIYPWNFDEKVDRDQSAEKFIRRMTNQCTYLIHEDVVPKNSLLYSEFMVLNELNNVKIRSEKLPVELKQAIVLDLFKKQKQITGKKLLNYLNANGYDVKKEDLSGFDGNFKSSLSSYLTLKKVFGEELDKYSVQQMAEDIILWITLYGDDQKMLRRVIRKHYEQQLSEEQILSLSKLKFQGWGRLSRRLLSEMEGVDCETGECMTVMQGLRNTQNNLMQLLSQQFSFMELIEEENGNYYVDEITYDNLVKDMVISPSVKRAVWQTVQIVEEIKGVMGCQPKKIFVEMARSDEEKKRTVSRKDRLLEAYDAIKDEARQWQEELQKYSDGDFKAIKLYLYYTQMGQCMYTGRKIDLSQLNDATVWDRDHIYPQSKTKDDSLDNLVLVDRSVNAKKSDGMLSPEIQQRMRATWKYLKEKKLISEKKYERLTRVSPLTDEELAGFINRQLVETRQSSKAVATLLKRVYDEAEIVYVKAEAVSNFRRDNLDYIKVRDLNDYHHAKDAYQNIVVGNVFHEKFTSNPLRWLKNNPNTKYSLNQMFNFDLEKNGVVIWKRGKAGSIKCVEETLKRNDILFTRYAFCNKGGFFNQMLTAAPEDKTKAKGLVPIKKGMETWKYGGYTSVTPSHFMLVASKDKKGKEIRTIETVPLYRWKEFKENPDALLQYCREFYGLKEPKVLIPCIKKNARLVVNGFPMHLKGSTGKQLILQGAVQLCLNNENIKYLKKVTKYLEYNAQRRDKRTLLEVREVTGINKEENIQLYDVFVDKLSNTIYQYRPANPKDNLIKGREKFIELGLAEQCVVLGEVLHLFQCKPLTSDLTLIGGSPNTGTIKITKTISNCNVVKLLSQSIAGVKVREINLLII

SEQ ID NO: 20647 - protein, 1383 aa, Artificial Sequence
  OMNI-120 CRISPR nuclease
MEKQNYYIGLDMGTSSVGWAVTDDSYHIIRRKGKDMWGIREFEEAKTSAERRSHRISRRRLQRSKVRIGLIKMYFDEEIRKVDPFFYERLDNSKYYQEDKDEIVKSPNGVFNDKEYTDKDYYNQYPTIFHLRKELINNENAPYDVRIVYLAVLNLFKRRGHFLNSSLRLDDESAEFSLKDAYSNLLTIMADNLPEELSIAFPEIDSDNTYLELQNILGTREFGRKQKGEKVAKLLGIDRKQKKEMEIVNGMVGLSIDCCKLFDIEADSKITAKFSDFGYAEKEPEILDQLGDNYGSILMAIKTVYDIGSLTEILKGQKYLSFARVEDYEQHKADLRKLKKVVKKYALERYDYFFRQKEDGTYSAYVNSVNSEKYNDLGSKDTKPNRRNMKARSRDDFYKGVKKLLKGMPEDDADVIEINKKIENETFMPKQLTAGNGIIPNQLHAMELKKILDNASGYLDFLNDVDESGFAVKERILRLYTFTFPYYVGPISSGSKTGWAIRKPGFEKGVILPWELDEKIDRTETAKRFIDRMVRRCTYLNDEMVLPKSSLKYERYCVLNEINNIRIDNTRIDNDLKKRLFNEIYLNGKKPGRKKIESFLYRNGVPRDAQVTGIDKELNNALSSYGKFKEIFGDELEKDSVKKMVDDIIFHCTVYGDSKKFIYDYIQKNYPESEYPLLNKKTIKRIIGFKFKDWGRFSEEMLDLQGCNYETGEVYSILTALWETNNNFMELINSDSFEYKKLLEEKSGSAISSLAEVTPELLDEYYFSAPVKKMILQTMGVIKEIVQIMKCEPDRIFIEMTRSDGEKGDKGRKDSRKKALLDLYKNIIDELHDKNYWKDLIENADKDGRLRSKRMYLYIKQMGMDMYTGEPIDLDYLFDENRYDIDHIYPRHFVKDDNIENNLVLVNKASNAKKTDIYPIPGFIKDNPKVWKLWEMLHKRGLINDVKYSRLRNSEPFTDEQKAGFIARQLVETSQGTKGVSDILKQVLPQTKLVYSKAGNVSRFRSDNKFYKSRLINDYHHANDAYLNIVVGNVYYTKFTSSPMNFIKNEYSKDSKKFEYNLDKMFAWKVERDGYTAWIPLKKGNEYIATIKTVEKMLAKNTPLLTRQSFVKSGVINKVTLYGKNTATHETYIPLKMSDPKMQDVTKYGGYTSVNICYFFLVEHEKKGKKVRTIEALPGYLEKKVENDPAELERYCVEGLGLESPSVRYRKIRIQSLLKVDGYYMHLSGKSGNSLIVRNACALSIGKKWQDYIHYIEKSEENGFKYDDSRITKENNIELYDIISEKHIDGVYKKRPCGIGDAVKNGKKKFKELTKENQCKVILQILQISSIGNYKADLSLIGGASMMGNMRISKEITKNEKVMLIHQSVTGLFEDKLVDLKSI

SEQ ID NO: 20648 - protein, 1087 aa, Artificial Sequence
  OMNI-138 CRISPR nuclease
MKYIIGLDMGIASVGYATLLLDDKEQPCRILKMNSRIFEAAEHPKDGSSLAAPRRINRGMRRRLRRRRFRKEQIRDLIAEKGIMTTEEIDEIYNSGKELSDIYEIRAEALDRILSKEEFVRLMIHLSQRRGFKSNRKVDASDSKSESGKLLIAVKNNRELLSEKGYRTIGEMLYKDERFAANKRNKADDYSNTFSRAEYEDEINQIFEAQLALGNPYATDDFRKKYLDIYLSQRAFDDGPGGKSPYAGNQIEKMLGHCTFEENELRAVKASYSFEYFNLLSKVNAIKIVGEGGKRSLTDAERKSVIALAFAKNSVTYASLRRELKLPDGKFFNISYGKGDKSAEEVEKKTKFAYLTAFHTFKKAYGQAYVGWSTEKKNALAYALTVYKNDNKIIAYLTDHNFEKAEIEIALTLPSFTKTGNLSVKALDKLIPYLEQGMLYNEACSAAGYNFKADDASKRMFLPANAKDAPELEELRNPVVRRAVSQTIKVINAVIRECGESPTFVNIEIARELAKDFKDRKQIEREQKENQEKNEKLMERLRNEFHILKPTGQDLIKLKLWEEQDGRCPYSQKPISIEKLFDVGYTDIDHIIPYSICFDDTYNNKVLVLSAENRMKGNRLPMQYLGGKRQDDFRLWVNSAHLRKRKKDNLLRESYTEEDKSGWKKRNLQDTQYMASFMLNYLKKYLALQPSDQGRKNQIISVNGRATDYLRKRWGVQKIRENGDTHHAVDAVIIACVTQGMIKRISEYAKYKETAFQHPETKEYFDVDKKTGEVINRFPLPYPDFRKELDIRCSDDPIRLLRLYPLVQYSSGEEVKPMFVSRMPNHKVKGAAHMETIRGHFKEDGKDYSVAKVPLTSLKLKNGEIEGYFNPGSDMLLYNALKARLAQFGGDGKKAFSEPFYKPKADGSQGPLVKKVKIVNKSTLSVPVHGGTAVADNGSMVRVDVFYVENEGYYLVPVYVSDTVKRELPNRAIVAHKAYEDWKEMDENNFVFSLYPNDLIKLTFAKEMSFSLTNKGSSLPPEMKCKEIFAYYKGTNIASGTIGVINHDNTYGIGSLGIKRLPHIEKYQVDVLGNITKVGKEKRMRFR

SEQ ID NO: 20649 - RNA, 129 nt, Artificial Sequence
  OMNI-103 sgRNA scaffold sequence with g31
gccaagacccuuuaaacagaccguuugagaguaguguaagaaauuacacuacaaguucaaauaaaaauuuauucaaauccauuugcuacauuguguagaauuuaaagaucuggcaacagaucuuuuuuu

SEQ ID NO: 20650 - RNA, 111 nt, Artificial Sequence
  OMNI-120 sgRNA scaffold sequence with g32
cugaguuuguaucugccacuagguuugagagccuuguuagaaauaacaaggcgagugcaaauaagguuuaaccgaauucaccguuuauggaccgcauugugcggauuuuuu

SEQ ID NO: 20651 - RNA, 123 nt, Artificial Sequence
  OMNI-138 sgRNA scaffold sequence with g30
aucucuugggucauccacagagguuguaguucccuaauuaugaaaacaauuagguuacuaugauaagguaguauaccgcaaagcucuaacgccucaucuuaaugauggggcguuaucuuuuuu

SEQ ID NO: 20652 - protein, 9 aa, Artificial Sequence
  HA-tag
YPYDVPDYA

SEQ ID NO: 20653 - protein, 7 aa, Artificial Sequence
  NLS
PKKKRKV

SEQ ID NO: 20654 - protein, 19 aa, Artificial Sequence
  P2A
ATNFSLLKQAGDVEENPGP

SEQ ID NO: 20655 - protein, 236 aa, Artificial Sequence
  mCherry
MVSKGEEDNMAIIKEFMRFKVHMEGSVNGHEFEIEGEGEGRPYEGTQTAKLKVTKGGPLPFAWDILSPQFMYGSKAYVKHPADIPDYLKLSFPEGFKWERVMNFEDGGVVTVTQDSSLQDGEFIYKVKLRGTNFPSDGPVMQKKTMGWEASSERMYPEDGALKGEIKQRLKLKDGGHYDAEVKTTYKAKKPVQLPGAYNVNIKLDITSHNEDYTIVEQYERAEGRHSTGGMDELYK

SEQ ID NO: 20656 - DNA, 27 bp, Artificial Sequence
  HA-tag
tacccatacgatgttccagattacgct

SEQ ID NO: 20657 - DNA, 21 bp, Artificial Sequence
  NLS
ccaaaaaagaaaagaaaagtt

SEQ ID NO: 20658 - DNA, 57 bp, Artificial Sequence
  P2A
gccaccaacttcagcctgctgaagcaggccggcgacgtggaggagaaccccggcccc

SEQ ID NO: 20659 - DNA, 711 bp, Artificial Sequence
  mCherry
atggtgagcaagggcgaggaggataacatggccatcatcaaggagttcatgcgcttcaaggtgcacatggagggctccgtgaacggccacgagttcgagatcgagggcgagggcgagggccgcccctacgagggcacccagaccgccaagctgaaggtgaccaagggtggccccctgcccttcgcctgggacatcctgtcccctcagttcatgtacggctccaaggcctacgtgaagcaccccgccgacatccccgactacttgaagctgtccttccccgagggcttcaagtgggagcgcgtgatgaacttcgaggacggcggcgtggtgaccgtgacccaggactcctccctgcaggacggcgagttcatctacaaggtgaagctgcgcggcaccaacttcccctccgacggccccgtaatgcagaagaagaccatgggctgggaggcctcctccgagcggatgtaccccgaggacggcgccctgaagggcgagatcaagcagaggctgaagctgaaggacggcggccactacgacgctgaggtcaagaccacctacaaggccaagaagcccgtgcagctgcccggcgcctacaacgtcaacatcaagttggacatcacctcccacaacgaggactacaccatcgtggaacagtacgaacgcgccgagggccgccactccaccggcggcatggacgagctgtacaagtag

1. A method for modifying in a cell a mutant allele of the sterile alpha motif domain containing 9 (SAMD9) gene having a mutation associated with MIRAGE syndrome, the method comprising
introducing to the cell a composition comprising:
at least one CRISPR nuclease or a sequence encoding a CRISPR nuclease; and
a first RNA molecule comprising a guide sequence portion having 17-50 nucleotides or a nucleotide sequence encoding the same,
wherein a complex of the CRISPR nuclease and the first RNA molecule affects a double strand break in the mutant allele of the SAMD9 gene.

2. The method of claim 1, wherein the first RNA molecule targets the CRISPR nuclease to a SNP position of the mutant allele,
wherein the SNP position is any one of rs10279499, rs201891812, rs73216083, rs542330750, rs7798225, rs10953089, rs10953090, rs10277338, rs71562815, rs12333976, rs3839837, rs78564070, rs6965201, rs6969691, rs2374627, rs12668221, rs28673511, rs10229795, rs7785869, rs67885698, rs6957832 and rs12704664;
wherein the guide sequence portion of the first RNA molecule comprises 17-50 contiguous nucleotides containing nucleotides in the sequence set forth in any one of SEQ ID NO: 9913, SEQ ID NOs: 1-9912, or SEQ ID NOs: 9914-20640 that targets a SNP position of the mutant allele;
wherein the SNP position is in an exon of the SAMD9 mutant allele; and/or
wherein the SNP position contains a heterozygous SNP.

3-6. (canceled)

7. The method of claim 1, wherein the first RNA molecule targets the CRISPR nuclease to the mutation associated with MIRAGE syndrome,
wherein the mutation associated with MIRAGE syndrome is any one of 7:93101391 C G, 7:93101435 GA, 7:93101512 C T, 7:93101540 C A, 7:93101615 T C, 7:93101761 AGTT A, 7:93101900 G A, 7:93102220 C T, 7:93102221 G A, 7:93102242 G T, 7:93102259 G A, 7:93102368 T C, 7:93102514 G A, 7:93102593 G A, 7:93102692 C G, 7:93102717 G T, 7:93103150 AT GA, 7:93103151 T C, 7:93103153 C T, 7:93103178 C T, 7:93103253 C A, 7:93103393 C T, 7:93103588 C CT, 7:93103598 T A, 7:93103628 G A, 7:93103679 C T, 7:93103765 G A, 7:93103772 G T, 7:93103793 C T, 7:93103851 G T, 7:93103900 A G, 7:93103916 T C, 7:93103933 G T, 7:93103938 GT G, 7:93104044 C T, 7:93104176 A G, 7:93104296 ATT A, 7:93104449 T A, 7:93104694 TAC GCA, 7:93104695 AC GA, 7:93104722 C T, 7:93105043 A G, 7:93105103 A G, 7:93105122 G A, 7:93105295 A G, 7:93105436 C T, 7:93105485 T G, 7:93105638 G A, 7:93105781 C T, 7:93105965 CT C, 7:93106002 GT G, 7:93106003 T A, and 7:93106096 A G; and/or
wherein the guide sequence portion of the first RNA molecule comprises 17-50 contiguous nucleotides containing nucleotides in the sequence set forth in any one of SEQ ID NOs: 1-20640 that targets a mutation associated with MIRAGE syndrome.

8-9. (canceled)

10. The method of claim 7, further comprising introduction of a donor molecule that encodes a synthetic splice site.

11. The method of claim 1, further comprising introducing to the cell a second RNA molecule comprising a guide sequence portion having 17-50 nucleotides or a nucleotide sequence encoding the same, wherein a complex of the second RNA molecule and a CRISPR nuclease affects a second double strand break in the SAMD9 gene.

12. The method of claim 11, wherein the guide sequence portion of the second RNA molecule comprises 17-50 contiguous nucleotides containing nucleotides in the sequence set forth in any one of SEQ ID NOs: 1-20640 other than the sequence of the first RNA molecule.

13. The method of claim 11, wherein the second RNA molecule comprises a non-discriminatory guide portion that targets both functional and mutated SAMD9 alleles.

14. The method of claim 11, wherein the second RNA molecule comprises a non-discriminatory guide portion that targets any one of a SAMD9 untranslated region (UTR), an intergenic region upstream of SAMD9, an intergenic region downstream of SAMD9, or Intron 2 of SAMD9;
wherein the second RNA molecule comprises a non-discriminatory guide portion that targets a sequence that is located within a genomic range selected from any one of 7:93100828 to 7:93101327, 7:93099521 to 7:93100020, 7:93099413 to 7:93099913, or 7:93106106 to 7:93106605; and/or
wherein the second RNA molecule comprises a non-discriminatory guide portion that targets a sequence that is located up to 500 base pairs from the sequence targeted by the first RNA molecule.

15-16. (canceled)

17. The method of claim 11, wherein a portion of an exon is excised from the mutant allele of the SAMD9 gene.

18. The method of claim 11, wherein the first RNA molecule targets a SNP position in the 3′ UTR of the mutated allele, and the second RNA molecule comprises a non-discriminatory guide portion that targets downstream of a polyadenylation signal sequence that is common to both a functional allele and the mutant allele of the SAMD9 gene; or
wherein the first RNA molecule targets a SNP position downstream of a polyadenylation signal of the mutated allele, and the second RNA molecule comprises a non-discriminatory guide portion that targets a sequence upstream of a polyadenylation signal that is common to both a functional allele and the mutant allele of the SAMD9 gene.

19. (canceled)

20. The method of claim 18, wherein the polyadenylation signal is excised from the mutant allele of the SAMD9 gene.

21. A modified cell obtained by the method of claim 1.

22. A first RNA molecule comprising a guide sequence portion having 17-50 contiguous nucleotides containing nucleotides in the sequence set forth in any one of SEQ ID NOs: 1-20640.

23. A composition comprising the first RNA molecule of claim 22 and at least one CRISPR nuclease.

24. The composition of claim 23, further comprising a second RNA molecule comprising a guide sequence portion having 17-50 contiguous nucleotides, wherein the second RNA molecule targets a SAMD9 allele, and wherein the guide sequence portion of the second RNA molecule is a different sequence from the sequence of the guide sequence portion of the first RNA molecule.

25. The composition of claim 24, wherein the guide sequence portion of the second RNA molecule comprises 17-50 contiguous nucleotides containing nucleotides in the sequence set forth in any one of SEQ ID NOs: 1-20640 other than the sequence of the first RNA molecule.

26. A method for inactivating a mutant SAMD9 allele in a cell, the method comprising delivering to the cell the composition of claim 22.

27. A method for treating MIRAGE syndrome, the method comprising delivering to a cell of a subject having MIRAGE syndrome the composition of claim 22.

28. (canceled)

29. A medicament comprising the composition of claim 23 for use in inactivating a mutant SAMD9 allele in a cell, wherein the medicament is administered by delivering to the cell the composition of claim 23.

30. (canceled)

31. A medicament comprising the composition of claim 23 for use in treating ameliorating or preventing MIRAGE syndrome, wherein the medicament is administered by delivering to a cell of a subject having or at risk of having MIRAGE syndrome the composition of claim 23.
